United States Patent Application Publication US 2026/0191916 A1 - sequence listing, part 86

SEQ ID NO: 584 - DNA, 5283006 bp, Bacteroides ovatus (residues 1,761,003-3,522,004 of 5,283,006)
  source 1..5283006: mol_type = genomic DNA
ttcaaccggtgctggctcttcgttgattgttgcctttttctggttgcatatcacgcggcatctcaaattggggaattcatgcaggctgaacaggtctggaatctgttgcaggaattgcaagtattgtttggtttccatctgcacttccagttccatggttacacggatgacacttcttttcattatcttgggttttcctgttgcccccgtgggtttggctacattgacaggacggatgtccgatgcgcctgtgtctacactcatggcaagctccactccggtgtttcctaaagagggggaatccgtaggatggggtccaaaagatgaagaactttctgcaccttcatattccgctatcaggtctgctatttctcgcacctcggttactgccacgttctttgcctctgcattcacaaaggtttccactttggtcttcaccctgtcggtcagaaaggcttttatcttgtcttcgcttttcttatggataagatagcttggatacttcttcgtgaagttccgggctatattttccatataagatatactataatcataatttaaattaattgaaacataaactattgtatcaaccttaaaaacattctgtaacatatgtgttgatttgatattatctaattctttttaaatcgcccattaattgaataaccgtatcaatataaggagcaatctttactatttgaatattatcaatacaatcctttccacctgcaactaaagcaggaacatagccataacattcatctatcttaggcatcgccttcacttcctttattgtattatattcattcaataaaaaccaattttcaagacaactcttattgaaaattacaatatttaacaatatgtcaatattttctgatagtattttaaacgttccattccttatattaataaaaacgacgtaatctccaattacatgattcttaacataagcaaaaatatctccaaaaacagttatcataaatggagtcactgtttcataatcatacataggataacattcctctataatatactgatagtcattcggtataatagttctaaacaagccattacaataaatgccaataccagctattctccaaaaagaaattagtttttccgaaaccaaattattgtattgtcggatataatcctcactaaactcttccaattttatagaatttccacttctttctaaaaatttctcaaacatactacttaacaatttctaagttttcaactaaatttacattcatctttatttttttctgctcctcttctgttataggaggagggtctgttattaattttaacaattcattttcaatattaagagaacgacctttttctatacttccccattgtgacccaatggacgaatttattcttttatttcccatttgagtcaccacatcaacatatcctcctgctatctgatcaggattatgtaatgctgctaagccttccaattctgagtcaaccattgcctctatagccttaatatccatatcttcatacaataaaagatactcatcaattttagcattcctatatctatccctaaaatcttcttgaattttcttagatttaggattacgcccatattttttaaaattctccctatttttcagccactcaaatatagtcatattatttattccatcctgctgcatttgcaattgcttcctcatttcaatttcataaaatggatctttttgaaatttcttctttaattgaaatggaggttttacaaaaattacagaaagacttttcttatttgaatcattgctaaccgaatcatctttcctctcggtagaagtttgatatataattgaaacatccgacaccttccacaccttctccctaacctccagattattccttttgataatccccggtgacaaatacagcaccatcatcatcggagagtttcctacactcatatactcttctattttcacacagaagcagtcccagaaccggaaaatgtccgcaatctccacttcgttgtagatgaaatggatttccccgttgtgcatggctccttcgttcagccagtcatagaagaactgttcttcacccttgcactcaaacgcaagcgtaatcaggtctccctcgaccggcagacactcccgattgccgatttcctcgcatacttggatgtggagttgtatgatttttctcagattcgggtcatcatagtgccggatgtggcaccgatagttataatagagtatcggcacctccattcctcttattttcagaatagtttcataaatcatgataatacagtttcaggtgaatgactatggtaataggtcacggctgatccaatagtatgtctgcccgttggactggaacggcttgccggcggcttcgtccagcagttttttcttttccttgaaatattcaatcagcatgtccagctccgcatccgtaatcattttctttttccgcaagtccttgacacggtaaacttcaaagaaaggatagtcggtcgggcaggaggtaaacctttgcaagacctctgataggggcattctcaggaaagtctttctccctaccttgcaatatctgtccctgttgcgctctgaaaggaaatgtctgaccagttttctccttgcacggcgggttgaggcatattccggtgcgttcaggctgtccgtctttacacgtacggtagattcttcggcatctgcctgtaggtagtcgtccggacagtcgcagatatccaccttcgcttgctttttctttttgaccgcttcgtatttatagtcaacgatcagcttggagggtgcttccacatactttctcaaccgtttgaactcctcttcgttgacaagcagataatagtccagtgtggaggacagcgagtccggcagtacgattggctgtgcaggcaggctccaggcaggttcggtatccggaagtacggatagcatggggtgtacccccgactggcggatatggtaataagctgtcattgtcgaatctgtcctatatcggtgtgtacccacttcgtcgaatgcccttgccagactgttgctcagcagggtattgtcaaacttcacttgtatcagcatggaatccacggcggtggtcagtccttccagttccagcgattcgttcttttgcggaaacaccagccatccctgtgtcatgctccgatttggaaagtccagacaataggtgttatggttcacctccgcatattcgttttcatttctgatttgttcgggatatacaatcagttcccgttttttccggctgatgcgtggtgccgagcaatctatcatgttcccgatttgcagcacgaagttgttgaagttatccggttctcctccgtagagctggaagccgatcatgcggcagttgttttttaccagcttgttcaccaaggtggagtctgcccactcgctgttgaaccctttatcgccgatgacaaccaggatattggtttcatctggacatttgttgaattgctccactccgatccgaaggccggaccagctgccgaatcgtccgtatgtaggtttcagttgctcggcattacgtgctttggcggaaaggaaatcaagcagctccatgtagtcgggagtcagtttgcagatggggtctttccggctgtccggttcgttgaaggtaagcacggcaccgaacctgaaagaaaagctgtcgtcattcaccagttgcgattgcagtccttggatggcattcaccacggctggaaaccgttggatggtgttctcttttccttccaggacaaacatgaggtttattttttgcaggtccttctctatcttgtttttgaaagtcccgtaatagattggattgccgttgacattcagcacatagctttcccgtttgtcgatgaccggcatcggaagccgggttttgaagcagaagctcgtgtcattgttccggtaggacagtaccgggctgtagcggatagcaggctggctggccgaaagttgcagtttccgcttcaggtcgttggatgatagcggcaaggtgtctttccgttccctgtctttaaaaacaagcgtgctgtccggcagcgaggttatgtctatatggagctgctgttcgggggcggtcagcaggcgttcgtctatccatccgatgacagcatgccctatgctgtctgcgtcaagctgcggcttgtctgccacgagggtgcatcctttgtcttccgatatttgataaggatatacgacactgtaaaatggaatcttgccagcctcttgtgtcaggtctgtatttttgaacagttttacggagtcgttggcaaaatacgtttttggggtggccaatgccacgctgtcgttcagcatgaccacctgtttgtttttgaatccggtaacaatgtcggtaaagccgctccgggtcagcaacaggtcgttttggttgatccatccgcagtattttgcctgtttccattctttcagtttcccgtttttcagaatggctgggtcgtattgaatgactctgagccagtctccttttcgcttgatgacgagaaatgcgtccatgtatttcacagactgcatctcgttctttccgctcggactcagataggatgttcctgcttcattggcaaagacaatccacggggtatgcttgggcagtgtctggctgcggggagcctttaccccttctatggaatagtttcgcatatattcacggggtacattctttatccgcataaaacggtgtaccggtccgcaggatgccatacagatgatgcacccgcaaatccatcctccttttatgagtgtcgatatgcaattctttttcatgcctcatttgtttttttgttcggaaaagcgttcgtgctgtgttaccatcagctgcatcacacattcgttgctcaggttgtctcccatatcgacgaacacctcgtctataagggttttcctgcgtgctatgattttcagtccttggcaataggaatagaaatcattcttcttgctgttgttgacggttaccgctatgtccggatttccgcaaaggtatttcttcaggatataattgtaatgggtattgaacggcttgccgtccacgatggcttgcaagtgttcacggatgtcattgccgatgatgacaagcacgtctgtcgagtcgttctccgtatattggggaaggatttcaatggtgtgccggaccggatattgggtattctccgtagtcagcagaacctcgtatatgccgggttctgtataggcgtagagtggattctgctcccgcgaatcgacaattccggattctccgaactgccagcgccattctttcgacggaccgtatcctttgaaagatacgatttctccttgaaaggcggttgccggtgctttcatcctgacaagctcgtcgcttccgtaatcatcccggctcctgtgtactgtgatgatctgtttcctttccagtcctccgtccacttgaaggcgcacttggtagcgtcccggtttcttgaacacgtattctccgctccgttcgtgtgatatgtccccgttgccgaattcccaaagccaggagcgtgcgttgcgggtgctgtctgcataatggaccgtttctccggtttccacctctatgggggtcagtgtcatacgcacggtgcggctggaaaagaacagccggatcagtatggcgacaaggatgcacagcagcatggctgcgattacgaacagaatctttctggtataaatttttcccatgtcatttgtttttagttcctgagcgcaagtcttcctcctttttctgcaagcctatctcgcactcctccagattggctttgaacagacttatgttttgtccgatactccatagctgtttcctgtcggacagccacatggcataaaagtcggcaatgtgcatgaacagcttgtatcgcttgtcccagctgttcctttcgtatgtgttccgcaggttgtttatcagataatggatgtcgtcttcttcatactgggcgtaaacgcccggttcaaatgtttctattttacggaacagggagtccaccggcaactggctttccgcttgttcctgctggaaatccttgatgcggttcatcttgatctttacgaactctttctgttcaaacatcttgaaatctgagttccacatgaagattaccagacaacacgctacggttgtcaggaaaaagaacaggaatacataggcatgtcccatgaatatttcccgtttgttcattgtctttctgttgttgtccatggctttccgttttattgtttgttgccgccggaacccacattcaggttacgccttgttttccagttgtcttggatgcactgcatcaggtctttcttcaccatctcttcctggatattcagcagacggatggagtcttttaccccgaggaagatgttgaggttttccagcagctgcctgtaaagcctgcaatctttggtgtccatgccttggacatatttgagcaggttcatcttgcgcgtactgacaacgctttgcaggagcttgtcgtttatttgcggtgaagtgttcatcagtttcatgtactggtagatggagtccatgctgttcgacagggacagctctttggcatagatatggtcatattccagtgcctgctccgtgattcgctttacttctatgccggaggttttcaggaaacaggcaaagatgcttaccgcaaggatggtgcagcatgtcagatagcccgcgaatctcagataggctttccttacttctgtgttgtttttcggtttcatataggatgatgttttatattcataaataggtgctgatacccagataggcgccttgttcggttggggttcccagcctgaaccgggcatcttcctgctggatgatgtagcggatctgtatctccttgtccgagggaaggaacagttctgtcagcgcattcagtattttactgtcggcagcgccgggaaagaagctctccatccgtcgggcggacagtggaccgatttctaccagcatctggtaggtgccgtcggcaaaactgtttcccagaaccatgtcgtctcccagaatgcagcttcccaatttgggaataaggcaggaatccacttccaccacgcatttgtctcctctcttgatatgcacgggcacaccggtcagaatggtcatgcactcgccggctttggagaggctcgctgtaatctgttccatataggccagcatatggataagcatgaccgccagatgggtcggcagcagttccagtacgggccattgaccggaaaagatgcttacgaaatccggatgtacgttcatctcgtcaatgcggcgttccttattctggaaggctaccagcatatggtccagggagatttcgaaaggcttgaagaaacggcgggcgaaaaattcctcttcgcggtggatgcggatttcgtccagcacctgttccttcgatattttctcggactggtaaaggttcttgtggaatatgccttcgggcagctcgtcataaaggcttctcctgttcacataaagatacaggtaatccgtcaggtcataatgggaatattccgggtggatgtcatggatgtctttcgagaatccgcgccggatgtctccccgtctgaatatgagggtacgctctgcatcatacccggcctctttcagtccgctggccaccacttccgccttgaagtcggtatccggcaggttgaatgaatgggaatgttcgtcaaaccgtactattttatcttgttcttccgtcatgtccgttcgcttataggggattagtccagtatgttccagcgtgactcgctcgattctttcggttgtctggagcgttcggcgacaacgatgttttccttgtgcttgccgatatattccagacggctgagggttgtccacaggtcattgaacaggtataggaaacgttccgccgtaaccatcagttggcggatattgtggtggttgtacagcagcccgcaattttccctcagcaggccttcgtaggcaccgggagtgatgccgttccattcgttgaagtatttcagcaggtcctccttgtcttccttgtccatgaaactcaggcatacatacaggcggtgagccaatgtggagaatacattcaggaagtgtagcggtgaatagtattgcccctcgttgcggaaggagaagtagatatcggatatgaacagcatgacatggcggcacagcataccgatgttggtggccaggctggtctgtttttctgcattctccactttggcaaggatgtcaaacgaagctttttctatggaatccacgagttgcccgaatttggtatagtagcctttcaggtccggatggctggacatgcttgtgcatggcgggatgaagtttccgtccacttcacagcggtttccgttcttgcgcaggcggccgatcagcagaaagtgtcttcccagctcgcttccgtcggtctgtccgctcggcagcacgctcaacgcatatttgggtaaggcattgggctggcgtggactgatttccttctcgttcggaatacccgaaggaagatgctcgaaagggtctgccatcagtatgacatcccaccgcttgtccttttcttcttcctcttctgtagggatatggaaactggcggtgagttcgtcatcctcaccggcatcataatctatcaggtaacctccggaagtaagggcgtggcaacgtttcaatcggacttccaaggtgcctgtaacgagttccgtaatgctgaaatcgccggaaaccggttctcctttcttgaatggcaggagtccgtaggtattgcggttcagatgaaacgactggtattcgcacaaccggtccgtaaagtggtcttcctgttgggtgaaatgccctttgttgacgggcattccgtccgcccagtttaccagcggatattttttcttttggctctgttttcctatcataatgtttctatttaatattcgttatactttataagttcgtttgccacacgcttggctatgattacatcgtgtcttttcagcttgttgccggcaagtgtaacgtcggggtctatatagcgccgtctcttgaaaaaggacggtttggtatagaatacccattcgtaataggctcctccttcattcttatatacgatgggcgaagacggtgatttgaggttgcagtcgtcaatcatgcgctggaaccactgcccgaagatgacatcctcggatgccttgccggttatgcgttccgatgcggggtcatccaccctgcggaatatgtccacatccattacgatgctccgttcacggttgatgtacaaggtatccgagtcatattcctccgaatatttccatactttataaatttcaatgggtatgtcgaaatagctgttcaccgtttgggaatacaggagtggaaatgcaaagggcagcaggcaggtggaggcccagatgccgtactggagttcgttgcagaggttgaacactacggaaaagagtccggctcccagaagcatgaccgtaaccgtcagcaggcattggatgccgaaagaaggcatttccttgcttgacgcgaacactttgcgaaggatgagccggttgtaatatccggcagtccagtacaggatgaccagcaggatgtaggcataaggcatgaagttatagtccatgaatccggacaggccgggcagggcaaggattatgccgcacagcagcagatacgcaatcagttttttgttgttgagcagtttgttcttgcgtgcgataaaataggccgcgattccgaaaatcacggtcagcagcggcatcagcaggtacgatgaaatgagatgttgggtaactgggttcataagtatggtatttatgctttattgtattctatgaatatccggtagttgaatgtgtccggcgaacaggccgagagtttggtacgcagattgtcttttatctgtttttcctgcgaaggctcatccagtttcgttccaagaatcagatggacttctttggttcggatcagtccttcgtgcggcatcgggctgatttccaccccgttccggatttctgtccgcaccagcagttctccgagttcttttttgcagaagctggctatgtcgttctgtgtcaggacacggccgtgcgaaatgaaggcgtatttgtagatgtcaatccgttctctgttttggggggcttgtttcccgccgtaggtggtactgaccagagccagtgtcttcgggtccaggtaagtggtggcattgggggacaggtttacgcctgcctgtatccggtttcctacctcacagttggttgtccagtatttgacggtaatctgccccttgccggacaattcgtcaatcataaggtaataaggtgtttccctgaactcgttcatgttgtccgctgtctgtttcatttgcgccatcagctgctccatctggatggtaagtgcctgtagcttgatgcttgatacggcattgaaggcatgggtctcgtcatccagcaggtcggacagatagccgagcagctccttggcggaacgggagtcgaaacgctcgcatcctcctttgcggatggagtaggttccatagctttccgtggaatcctttgcggaatagaggagttcatggtagttctttccgtcagaatccttcacgctgtgtacggacagaagggattcgtagctgcccgtgcgcaagggtatcaccctgaaagtttcctcaagggtggtcgtctgttcgtgaagcgtcttgttctctacaggcacgatgttgatgccggcatgaagttcttcaaggacttccgttgtgaaatgggcggggaactgtatcttcacccataccagcttgtcctgcatcttctccagaacggcctctttgaaacaggaccgcagggtgtccggaaggtttttcctgcaggaaccgtcgagtggaaaggactgcgataccttcagaaaatgtttgctgtaaatatccatgacttccttgtctatgacggacattacgtcatagtcttggaaaaaggcacgggttggttctttctgtatggttgtcttttcatggattcccccttccatcacgactgtcttcccttctacggaccattccgtacaggggagcaggagcagatattcatagctctccgtaaggttgggaaaatctagatagaacgaaaagtcttcaaggtcggaaatggattcatccaccgccattcctaaccagacggtacgcggagacatccttgtctctgcacgggcaatcatggtcttctccaaggtaggggctatccggtagagaaggtcgtcgcagaccatatatttcacgtcggctttgtgcagcagggtatcgcaggcgggataaaacgatacgcttccggtcgatagcttccgggtaagcgagtcgctctcgtaatacatgcccgattcccgggttatcaggtaacacggttctatgggataggcgtgtacgatgccgtgtgcgggaaagggtgaggtaaggatgtccggggtaaggattcgggcggtcttttccagcagccttgtctcgatggcggtaaaatcctctcccagcatatatatctcgttggacaatgcttccagcaggagcttgacaaccgggtcgaagttttccgccttttttattccccagaaagccgcagcgtatttcagcatacggtttctgatttgctctttattgtatttttctgtactcataatcctttcatcgggttgaaatcggtcctaaatagattacataatagaaacaccgtttttctccggtatgtaccagggttccatatacatatacttgtacacgtttctttacggcgggagcatcaaatacattgtcctgtcgggtggtgtcatcaatgatgacacgtacatttacacccgtaagccgcttctcgtgccgggtaattgccttggttatgtattccgagaattgtccttcccaacgggtgtgtgagacaatgctttcaaagtcgagaaaaaagatctcacagccgaactccttgtcaaaggcatgttcgccgggagccgtactgatcagcagttcgataaactggtcgatggactcgatttccgagcaggatgcaagacggctgttttccacatcctcgctgagcaaggcttcaaaatccaggggcaatttgcaaaactttgtttccatacttgtcagtgccattcgttttcaaattcttcgtctatgaattttagtgttcttgcggcaaacagaaggacgatgctgctggaattggagatacggtcaaccttgcgttgcagacggatgcagttcccttccacaaagcgcaaggcaaatgccgcttgttggtcgggttgctccttcaggtagatccgtatttcgccgtcttcatgggagtggctgtatgcggcccatctcaacagctcgtcacccggcatcccgctgagggtacaggtgacgaatccgccgtatgcctcaccttcaggcaatccgtcacggtctgtattccgcttgaattgcaggtcgaactcttcaatgctgtatgtctcatggcagacggacagccgcatcacgtagcggtcatccggcattgaggattttttgtttctgaacaatgaagtgaaccagttcatgattataagtttaagtgacacgaatcgccggtctccatttcccggaagtggatgaatagtgaggtacggctctctttggttgttgaatgcacattgaaatcaaggcattttgctcccttgaaacggatgatctctttgggagtaccgggcaggccggaagtgttcatcacctctccgtccttcaggattcttgaattgaacatccattccaagagttcctctgtaggaaatccggcaatgcttacccgtattttaccgccgtaggtcttcccggttacctttccgttaggagtggtttctttccggaagtcatactcgtagcccagcaggtcgtatgcctgcacttcttcatgctccgagggttcggctgtccagaacttgatatacgattgtgcactcatatccttatgttattttattcttcttcactcatcagattggtttgcagcatggcggtcagggtccgttcctcgttcatgcgtgattcaacgaacagtaccgtgtcttggctgtccagatgcttgcgtacataggctcgcaggtaggctttgaatgcctgtacctttgtccggtattcctctaagggaagggcaaagatatcttgcgtcccgacccgttccagaccgtatctctccagttcttcttcaaatgacttttttgattgatcattggagattgtataaattattaataccttatactctttcataaacaatgaaattaaaaaaataaatagggtgtccagtttgatgttccagcttttagttcaaaaaagatatgatgcaagttccaaagtgctgataatcatatctctttaaaatatattgattcaatgaattagctatgcttttttgtatgttaaaattgtacctaaaaacaatagtgttatagttaataatcaatatcttaagttgttaaatcaataccaaaaacgagagcgtagaactggacaccctaaaaaataaagcaaatcctaataatacaataaaaggagtaaatatgaaaagatatgcccatacattagaactatgttcataaatttttctttccataattcgttcatttctatgtttataccgataataaaaatagagactactccttaataaaataataataatgaaaaccaccaaaaacacattacttggttttttttgtggtgattatcccattataatataatagtatataattgcaatatctgccaaattgaataataagactgtagacataataaatggaacatgtatatttaaatacatacttgtgtccatatatcgagtcaatacttgaattttataaaacaaatattctaagattttatgcataactttattcattaaaatatccaaagccatctgtagctgtatccaccaaatagtaaatagaactaatagcaaatccccatggtcccaatatacctatataggtaaatcccacatctaatgctgctttaacaaatttcttttccaatgttcttccatcttctacaaatattaaggaaacagaataaccagcagaagcatacgaactccagtttccaagcattttcataccttttaaatatttagtcccggtttttccaattgcttgagcctctttaagtaactgctgctttttatcgagtgaattaaactgcttccaagaataaccatgaaaacttcttattccataatctattatttcagttttcgcacctaacccaataccaaaagctccaattcctgtattaatattatcaagaatttccttattaaagcccactccatctgtaatgtcaaaatcttgtttaattcctttctcatgtatataagaacgaatcgtttttgaatcactcaaaagaatatttccttttgaatctgtagcttctatataaataaaataattaccaccttcctgattcaaatacacattaaccttaccttgttcttttggaaaagttacagaccggtttcccacagcaacagttatggttccattaccattatcataagttattctttcaattatatcttcagtagtgtatcccatgctcaaaaagatgcgctctggactatcatctatagcttgataaaaaagagggtgtaactcacaactgctccattgcacattaccatctgtaatcctgaaagcctgtgctggcatatacacaggacaggtatatccaatacccttgacataacctgtatatggaactcctattgattttagaaactcaaaatcctctagagttattattctattattcagaatatcgcccattactttacccaccgattatcaaattcaataccattcacgcttacactctctggagatagaatcagacttgttgacaatccttgtcccaaagcctctataacccgtctcagattgacacaatatgcattcgtaaacgccacctcaaacacgattccggacgttccagtcttgaacagaactgccccgttctttttcacccacggtttcacagcccatccgtagatgttgcttttcaccgtctgcgaaagggttatcatgattcgtcctccacgcacttcgccttccggttggttctttaggttatctactggctggtgaaaacctattttgaactgttccactgcatattcgtcgccgtcaacgctgaatatgacattcacgttgctgtccacttgcggaaaattaaaaagtcccataacgctgctgtttttaaaacacccactgattttcaaactcttctgtaccgaatgccagtttctgtgcctgtacggtcagtttggtcgcaatatagcttttgccctgccggatatagctgatttccatatccacacaggtcgctttctcaaagagtatcttttcgagtgtggagccttggttgtcatggactacgatggctccgctctggtatttacgggcatccagcatccactggatcatgtcacggttgggaagatgagggtaggttacataaaacgtgccgccttttacctcggtctgtgcctgtcctttgatatctatcccttgggcaaatccgaattcgcaaccgatgagctggtagctgtccttgtacatgtcggtcagtgaggaggcagccaggttgcctatctttaagaatacggtatatccaaacatagtgtacttgattattggtgaatattccaggttaattcattctgttcgtccagacctacctccagactttttcctttgcccagctcctcgttgatgataagccgtgaaatcggtctgcgcagatagttacggattacaccggccacttggcgggcaccgtatttgggtgtgaatcctttgtgtgcaagcatcttacgggcatcatcggtgatggttatgccgataccctgcttgtccagaagttttctgactccgttgaactgtatgtcgaatattttcaggagtatgtcttcgcggatgggggagaacggaacgatttcagacaggcgtgccagaaactccggacggaaatactgccccatcacctccatgatctgggtggtggacggaacattgccggactcaagttgcttggtcagccactcgcttcctacattggatgtgaacagcacgatggagttggagaaatccccttccttgcccagacggtcatgcagttttccctcgtccatgatttgcaggaaaatgtcatatacggacgggtgcgctttctctatttcatcaaaaaggacaacggcgtatggctgttgccgtattttattgaccagcatgccgccttcctcatatcccacatatcccggaggcgctccgtacagcagggcggcggagtgttcttccttgaactcggacatgtcgaaacggatcatggatttctcgtcattgaacagggcttccgccagtgctttggcaagttcggtcttgccggtaccggtgggtcccagcaggaagaaggagccgatgggctgtcccggcttgttcatgccgctacgggattccaggatggcatccgtcaatgtcttcagggcctggtcctgtccgacgacgcgtcgcctcagataatcttccatattgagtagccgttccttttcctgcgactgtatcttgccgatagggatgcctgtcttgctggcgacaacggcggctacctcatagatacccacctcctctattttcttctctgcaaattggaggaggacgttcaatgcgtttctcagatagccggtcagttcttcatactcctgcaattcatggatatccgcttcatcgggtatgactcctaaaaggatggggcttaatttgttgtgcattacgaaaagcagcgttttcagttcttcggtcttttcctgaaggtccttttcgtccttttctatttcatccagcccggatagcagggtctccacattcttctttcctgtttcattgaccatcttgatggcggagagcgtcatgtccagcagaccgatggcggaatcaggcagacggcggtctttgatataccgtttggcaagacggacacattcggctacggcttcgttgctgattcttacatgatggtagtccacgtattgtttctgcacggagtgtagcatctggatagcggactttatgtccggttcgcttacctgtatgacctcgaaacggcggctgaaagcatggtccggctcgatgattttgcggtattcgtcaatggtggtggcgccgatgacggtcaggtcgccgtgcgacagttcggatttcaatacatttcccgcaccggtatttccttgtcggttgtccagcaatacatggatttcgtcaataaacaggattgcattgtcgatattccgcaattctttcaggatgtttttcaggcggtcctcgatttcccccttgtaggtggctcccgcaatcagggaggcgttgtccagttcaaatacacgggtttcttccagaaacgagggcactttatggctgactatctcccaggcaagtccgtaaaccagtgctgtctttcctactccggcatcaccgacaatcaggacattggacttgctccggcttcccagtatctccatgaccatacggttttcacggtcgcggttgatgaccggatgcagcttgttggccgcatcttcggttagatccacacagtatttgcccaagaaggaggatgaggcggaagtcggggcataggacttctccgtagtggcagaaggacatgccggctgcccgttacctatatatatggaatggatatccttttccagaatggggaaagacctgagctggtcgctggaaaaagcgacaccgggctttgccagtgccaatagcacacagatgggattgatgtcgaacagcccgaactggattcgtgcatcgtctgcggcacggaaaacggcgtcaatccgttccgaaggcttgatttcggacaactgggtggatttcgggcattgttcgatatacacgtccgcccattcctccagatagcctaaatccttgcctatacttattataaaatctcttaaccctacatctttatgaagtagagccttcaacaaatgcgagggtgtataacactcgttcgcattttcacgagccactgcaagtgctatgttaagcgcaatttttacagaatcatcaagattgatgaaaccaactcctgtttccataatcgtaagatttaaaaattgcgcaggagaacattgcaaatataaggcaaaaaaaataattcggctattgttggcagtgttttttttatgcttatgggcatattttcggcaaaaacaagaaaaaatcatcaaaagttctttgtagttttcagaaaatgccatatattgggcgcagaaattgaaggacaaagataggactgtagcaggcctcctttgaccggatatttcaaaatcaacttattttttaatttaaaactttgagaatatggcatttaaagcgtcatttaagttttcggactcaagagagtttgatgtactgacctggagagttaagttcaatcgtgatgtggaccccaaaggccgtccggcatctgacatttatggtggcacaatctatgtggaaatcgaatcaactcccgataccattgtgctggataagatgttcaagcagtaccagcccgtaaacggaaacatcgtcttcaagaaagcggatgaagatgccaaaatgaaggaattggtgttcgaaaatggttatgtggtggattacgaagaggcactgaatgtggctaacccttatccgatgacaatcaagttcgccatttctgcacagaccgtgaagatggacgaggctacatttgtacaggattggccggaaaacaactaatggttgtttcctaatcaaagttttaaggtgccggaatataccaattccggttatttcggcaccaaaaaacataccgaccagtcggattatttatttaaaatcatagtttaagatagtatgggagcaagttttctgaatttggtggctactaaagtaaccgtgaaaggagaagaacagaaattcgtttcactgcatctccgtcagggtttcaaccggcatcacaccttcactgtggtggtgaattatctgtcgcctaacaatacgttccaacagaccccggaaaaattcatcggctacatcggggagacagccagcatttcatttgtccataggcagacgggtgaaagttatgacttcgagggaatcatcactcaagtggaaatggttggaagcatgggcgagacaggcggagtggccattcacggaacaagccctacgatactgtatgagaacaacaggacactcgattcttggatggatcagtccctctctaccataataaaggaggtgacgcaggagtatggaaaggtcaatttggtttccaatcccaagtatgcggcgcccataccctacatggcgcagtataacgagagtgtctttgactttatgaatcgcctttcggctctttatggggagtggttctattatgacgggacgaaagtgtatttcggcaagcctgacagggacaatacggagaagattgtttatgacatggatttggaggaggtacgtctggttgccaatctggtaccgggtaaatccgcaagatacgattatgtagcgcaggagaacaaacagcataatgcggatacgcctgccaaaccggatggcatgaacgaccttcagtctattgcacacagctgctctgagaaggcatatactgcaaaaacgacctcggctgccgacccccatgtaacggacaaggcggaactggacgaacagatgaggattgtaaagaatgcgtctggtgccaatcttctgaacatcaaaggcataggaaagacttgccggataaggattggtgaaatcatcgatgtttctttccctgacaggatgaaactgcctcctttaggcaagttccgtattgtcgggattgagcatgaggtacgccgtgacggacattactccaatagttttgtcggtgtgccggacggtacggtacatattcctgttcccgatgtgaagcgaccgttggcgttgccggaactggctacggtgaaggaaaacaacgacgacaagggacagggacgtgtgaaagtggctttcgactggcagaaaaacggcaagacaaccaattggatcagggtgcagactcctaatgcgggagtaagtggtgcggtttccaagaatcgcggatgggtatttgttccggaagtcggcgatcaggttatggtaagctacgagcatggcaacccggaccgcccctatgttacgggatcggtgttccattccggttcaggtaaaggaggggacaaggacaacaaggtcaagagcattatcacacgcagcggcaatgccatcgttttcgacgatgagacgggaagcatcgttattaccgaccagacgggaaaacagctgatcatattggatggcacggatgccattaccgtcatggcgaaaagaagcattacccttaccaacgaggcggaatcggtcatcgtaatggatgataagtcgataggcttgcaggccgataccattgctctcgaaggcaggaaaagtgtaacattgctgtccggcaacgaatgtatggtgctcagcagcgaaaagagtataattagcagcagcggtaccaatatcaaacaggaggcggcaaaggattacgatgttgctgcaaagaacggaacggtcaacggtgtaaatctgatgatagagggaaagggaaacgtaacggtttcgggaggaatagtaaagtttaactcataattcggttggctatgggagcatctgcatctgtgatacaggaatattacaaagcagtcgattactgggcggacatagtcggcaacagggactggaaactgtctgtatggattgtcgggcagaatgatgtggacttggtggacaggtttctggaaatagaacgttctccggtagggcagttcgatgacatattctttcgttttgatacgccgtacaggggggatgacgaggaatacactgaacagctctggcaggaatatgcgggttggttttcagaaaaggttgaggagaagtatgatattctcagggctctgaggcacgacgggctgctgaaggaagaatacattcctgatgtgtcggttgagcatacggcgggcaacttgtggagagagatgttgcgtttcaaggcatgtatctcccggttggatgatgcctttttctgtctgtactttcctccggaacaggaaagggggtattcccggacaggatggttcggcaatgtgctgaaagaaggtgtcccgcagggaatccggatgacaaccattgacttgaaaaagaacaggagtatccggctgggtgagtctcgggaagtggtttgcatacgcccgcagttcgatatggcggcggctttgcataaccggatggcacggtcggatagcggtaacgacctgattgcacctgaaaatcggttcaagcagcaggttacggttgtcatggattctacacaaaagcaggattggaaattattggacagagaaatccgaaaactgttggatattgcacaggaaataaaggatacgaatatccggatttccgctctgcttatcgcatccgaggcatgttatgctatcagggaatataagcatagcatgaaatacagcgacgaaaccgtccgggaggcggaaaaggcgatgcagggcggtgaaacggcaggatatagttattggaaaatggctgtttccatgaaagcggccattctgacagccgggaaaaaacgggaggaagcggttgccttgtatgacatgatggctaaaaaagccgtcatgcaaaaggacccttattatgtcatggaaggctatcgcatgtgtggtttcctgcgctatgaggatggaaagatggaacaggctttcgaatattttttgcttgccctggcaggaggcagctacctttctgccgaaatcaggcggagttccacgttcgtttatgcggcgtatctggctcttcatacaggaaggctggttcgtgctccgattgatgtcgggatattggaacggcagctctgcgaatggattggggaggattggaaggaactggtggacaatccggatatgcagcaggcgaaggccagaagaaggggaagttttttcagttgagcgagatttaattaatatatattttaaatttaaaattgaataagtatggatcttggtaattatggaatcggcggaaacgaagtgaagattgacgcttccgaaggtattgcggaaattccacaaaatcgaaccttattggtggaacagctgacgaaggatgagccggtggctcccgaagtggttgccggtctgaccaacattgacgaagtctttgcacatttccggccggaaatagatatcgagttcgcggatgcggacggtgctcccgtagaggaaaatttccgtttccacaatgtcggtgatttttctgtcaggaaaatgacggaacagagttcattcttgtccggcctgaatgcggaaaagcagtttgcggacaggatggagaagtcgttgcgttccaacaaggtgctgcaacgggtgctggaaaatccggagacacgtggagcgtttgtcaatgcgatttctgccattttggacgatttgaagaacaatgagaagtctaaccccactaatgaatgatagttatgagcgaacagaatacacaaagagaagcagccgtacagcagcaacaggctgtggcgcagtccagaaatctgaacgctgaattgcagattctggctaagtttggcggtttcaatgtcttggaatcttccgtggacggcatacagaacatgaatccggagcgcaaggcacggcggaacatattcctttccgaccccgaacgggcggctgagcgcaaggaactggaaaaacggcttgagatgtgggtcgatatgttgaaaggcaacaaatccatcagcgagatggtggaactgtgccagaagaagtctgcggcggtgtccggtctgctatcccagaaccagctgaaagcggtggaagaggtcaggcagttggagaagtcctaccgcacggtcatgctcttctacaagaatacggattccgacaagatcaagaatatctccattgtgaacgcttcgatgagccagcttaccgatttggacaactccttctttatcgatgccattgctaacgagcttcgtgcgaattatgaccgtttggacttgcgtaccaactattccctgctggttatcccgggatatttgggttccaacaaggttgttgaaaaatgggcaaagattgcgcatgacaacaaggtgatgatttacacggatttcgctgatctggaaaaaccggatgatgtcattgaaatgttctttgattccaatctttcgggaggcgatgtgtacaagtccaacgtatgtatgacctgcaactatctggtaggacggggacgctatgcggaactgggcgaaaccgaagacttgctgattcctccttctgcggcattggccggcagtgtgtacaagacggtaatggcacaggttaccgccggtaagaagtatggttccatgagcgaggtggacggggttgctttcaacctgaaaaaaagcgagatttccgaaatcgagaagattggcctgattccgatggtgaaggaatacggcaaggtgatggctttctctgccaagacattgttcaacggggacaacttgggattgcagacctattccgtagtccgtgtgttcgattgggtaacgaaagtgctgatggatttcctcaaccgccgtgcctttgagaactggaacagcaaggcggaaagggatttgcgtggtcagatcagcaagtttttggatagcatacagggtcccggacgcttgattgagaaattcaagattcttcgtttcgagcgcgatccgaagcagaaagaccgtattttcctcgacattcacctgactccttatttcccggcaaagagttttgtcatcaagttggaaggtacaaaaggggatgacgagaacgactggaacagcgactatgcacaggatgcataggtaagtccttacagggacagccggagtgtgccggttggaacacccggttgtctctttttcacattctaaaaaattctcaccatgtcagatgtgttcaagaatatagctgacgccgccggtagcagcagcgtcagacggggctttgccgaccttttttcagcctccaaggcggctttggacgagattcaggcgggtctgggcggaatccttccttccatgccgggtatgcctgtcgccaagttcggcgacctgtccatcgggatagacatgcatcctaccgttacccctccctctcccatcatgcctgtgcctcatgtaggcaaggtgtacgacctcatggcagacctcatggccggcatggcggctgccatgccgcctgcggctgatggagtggccggagtggcgtgcaacatcctcaagagcatggctccgtcggtcaaggtgcataaccagtggattgcgcaggcaggtatcggcatcgtgcatctgccggcatttgtattgcatccggccccgttggtcagcggtatgtccgagtccgagatgtggatgggcagttccactgtcctggcggacggtgcgccctgttcctccctcacacatccggcactctcatgcaacattgtgggaataccgacgattccccgcaaggggaagcccaggaaggtgagcaaggccctgcttgcccccacttccatgctctccaccatcacatccgtaggaaatcccgtgcttgtgggaggaccgcctaccattgatgtgtttgcgctggcgatgaagctggggctgaaaggattgtcaaagctcgggaaaaaaatatcccatctgctgcatggattgatagacaaggcgggattgaatccccggcttgccaggattctcaagaaaacagcttgcatcatattcggtgagccggtggacgctgctacgggcagggtctatcacaccaatgtggacttcgagcttccgggtccgattcccgtcgtatgggaacgtacctattacagtgatgccgccgtggacggtccgttgggatacaattggcaccacagctacaatctgggaatacggcagttggaggaaggggcgttcgcattccgtcatgctgacggacgggagtccttcctgcctgcgctgaaacttggagaatcccattttgaccgcagggaacagctggcatggacactcgatggccggggttacatgcttacggacatccgggggttgcaataccgttttgacggtcccgaaaaccgctccggttaccgcatggtatcgggcatttccacgaaggacggattccggctccgcttcgaatacgcttcggggggaaggctggcaggaatcatatcctcacggggagaattcctgaaagtggaaaccgacgagtcggggcgggtgctctgcgtttccgtaaatcaggacggtgaggaggtgaagctggtccgctaccgttacgatgaccggggcgacatggtggaaaccattgacgcgctggatgtcagcaaacatttcgtctattccggcggacacctgctggtacagcttaccaaccaagggggtatgtccttccattgggaatacgagggtaagggtgagaatgcccgctgtgtgcatacatggggcgatggaggcgtgatggaatatttcatccgttacggcaagggatatacccatattcgtaacggggaaaatgccgaaaccgaatattattacggtgaggacaaactcatctacaagatagtggatgccaacggaggaattacccgtcaccaatacaacagctttcaggagttggaggtcacggtcaatcccgaaggctatacccgtaagactgcctacaacgagttcggccagccggtccggattacggacgagaacggggaggacaccttcctggactacgacggcaatcgcaacctcgtctcgctctacactccgggtggaaaaaggctttcatgggactatgacggacaggatcgggtcgtcagccggaccacaccgggcggagagactgtgaaatatgcctacgagggaggcgtgctgcgcaccataacggacgggcagggacgggtttacacgctcacgttcaacgacaggtacgatctggaactgatgcagttccccaacggactgttccgccggtgggagtacgacggcaggggaaggcttgtacaggcggtggatgtgaaaggcaatgttacccgttatgcctacgaccgtgcggacaacctgatacggctggaagagccggacggcaacgtgcaccggtttgagtacgatgccatggggaacatggtacatgccagcgacaacatccgcgaggtcaggttcacctatggggcactgggggtactgaaaagccgcgagcaggaacggcaccacatcaccttcggctacaacagcgagttgcagctccggcgcatcggcaacgaggcgggcgacaactatttcttcgagctggacgggctgggacaggtcgttgcggaaaccggcttcgacggtctgcggcgtgagtacgagcgcgacggggcgggtcgtgtcacccgtgtgaaccgtcccggaggaaaatggacggaataccagtatgatggactggacaatatcctgaaggaggaacagtatgacggggaagtctccctctacacgtatgacaaggacggcatgctcgtcaaggcgaagaacagcgagaacctgctggagttcacccgtgacaggaagacgggactggttacagaggaaaggcagggagaatacactgtcagccgcacctatgacagcgaaggcaactgcacccgcatcaccagcagtctgggagcggacatccgccatacctatgaccgggaaggcaacctgcagaccatgcaggcaggtgaaagctggcaggcatcctgggtacgtgacaataccgggctggaggtgcagcgaagtttctccggcggtgtgactgtcaagacggaacgcgactgtttcggcagggagatacgcaagtcggtacggtcaggcggcatagagaaaggggcttaccgctaccaatggggaatcgccaaccgcctgctctccaaggaaaacgagctgacgggaacggtcattcgctacgactatgaccgtttcgacttccttatccggcaggaaaccacccaaggttcggaaacggatgtgatttaccgtgtgccggacttcgtgggtaacctctttgagacaccggataagaaagaccgcaaatacggtgccgggggaaaacttttggaagacccggattgtttctatcactacgatgatgaggggaacctcattttcagagagttcaagcatttgcaggaaacgggtgtaaggttcgaccgcaaacgtatggagaaggaacggggtatccattttctggcaacgggaacgggatggctttacgaatgggcttccaacggcatgctgaagaaggtcatacgtccggacggaaggccggtggaattccggtatgatgcgttggggcgccgcacggcaaagcaatacttcgggaaggtcacacgttggatatgggatggaaacgtgcctatacatgaatggagatacaaaactacagaaatacaaccagatgaaaaaggagaatcctttcagaaagagccgattgaaaacattaccacttgggtatttgaagaaggaacttttgttcctacagctaagatacaagaaggtaaacaatattccattgtgtccgactacttgggtacccccatccaaatgtacgacgaacaaggaaacaagacatgggactgtacactggatatctatggaaaagtgcttgccattgataagggaacagaatttgattgtcctttccgctatcaagggcagtatgtggataaagaaactaaattatgctacaaccgctttaggtactacgaaccagaaattggtaattatataagtcaagaccctattggactaagtgcaggtgaaagattttatagctatgtcaaaaatgtcaatctttgtattgatatttttggacttgtagccaaagaatttgacatcgatacttatggcaatattagcagtagggcgaatattggtgacaatttaacagcacacgaactccttcaacacgcatggcttgaacagaacaataaacttcccacaagtaaaaatagaggagttgatttaatttctaaagaaaacccttctattgcattaagagaaaagggtatacacaatagaattaccgctcttcaaaatagatatgggatgaaaggtaaaaacttgaaaggacaatctgcactagaaaatataaacaaaaatgcagctttaacacgtagaggaataatggaagggttaatagctgatggcatggatagaaaaactgcgaaagaaaaagcaaccgcattagtcgagaaactcagacaggatgcaatagcacatgctaaagcaaataatttaataacatgtaaatcataaaatagttatgaacataaaaaagatattaaagactagagaagacgctttatattatgatatatgtgaatataaagaaaactgtaatagttgggttgggggtaatgctcctaaaatattagataatatttctttccctaatatggaaaaatattatttctacttaaccctgcaaagcccattaaataaagaaagacaatactctatttttactccagattttgatacttccttagaatacaattcatatcctaattgcaaagtattactaattgaacatgaaataagcgaacagagtaattgtactaaatttaaacatcccgaaattgatgatatttattccttatatgaaataggagaagacagagatgggccagaaaaaaataatgttatcaaatttggaggaaaagctataccaatacaatggggattggataatgatggaaaagtaacaaaagatggatatgatttcatttttcaaatcaacgaaattggaatgagaggcatctcagaatttatgagtggaagtatatatgtatatggtaaaatagaaaatgaaaatattgaaaatctttttgttgcatattgggagtattcttaattttttagtacaatagcaggtagtatcaaaacaaatgtattacatattaattattggaacactacctttattgttaagttacaagacccgtcccggcggattataaatccgccggttataagtattaggatttgtaattcttgaatttccgactgaaagtatatggagataagcaagatgccaatcttataaatttgcacagctttctatttttataaaaataaggccaaggggctataaacattatccaacatcgcttagctcatggtccaaatcaaacctcaacacataaaaaacaccattctccacatagccgaaacacctgttccgctgagtgattctgaactttttaatgcctttcttccataggtcatccgaaaaatagcgcttgcttttcttgttcttgttatacggtttataatccaatccattatctgtagcaatggcactccagtccaactcctcaaatttatggaatgaatcaataaattcgttctgattctcgccgtcaataagggaaaaacccagcgtgtcatcaataaggctgaaatcaagcttgcctccactgaaacgaatggtaatatacttttcgagagatagttcacccctttcaaacaagatagagtacaattgcttctctttccagatattaccaacctcgattggttcttcatctttggttacggcaaccagatgcttctcatacctggatctaataaatgatagaagacaaaccgagcgggctgctgcttcggcaactgaactgccggatacatcggtttcacctactgaatattgggcattggaatcctgttggggagcttcatcccaaaacggattacagatggcacgtgccaatgtacttttatacagcctggcttcatcgatgatacgggtttccggtgctgtcagcaaatcgtgtaaagtcttgtcgggagtggcttgcgcagcaaaaaaacttccttgtttgaacagatatcccactccatgtgaaagggcatcctgcaatgccttgtgaaacggaggcattccgtttttccagaaatcccggctgtccaaaaactgtccgttcaatgacaattcattgataatgataccgtccatagagtcttatagctttaaaatggcatccaaatcaatatcaaactgctcaaacatgccgggaatataggattggattcctccctgtggggtaaattccacaggttcggcatgggtcaatccattcccgtcttgtctgaagttgtacacggcaacgtcagacaaggccaacttttcctgactgatcaggcgccggataccgttaaacaggtggtcgctatggctctctatgatgatttgcacaccggctttcgctatctttgccatgaaatcaatcaggtcggcttgtgccttggggtgcagatggatttctggattctccgtaatcaccatgccgcctttcggggtcgcgaaacaagctatgatgacttccgtcataaagcttactccggtaccgacatggtaagggagaagctgtttgccgctgcgcgtttcatattttacgtaatgattgcttcctactgtttccaccaccagccggtaaccggtcagcctgtccagttgataattcacctgaccttccagggtttgagtgccgggagccaggatcaatgcggcatccagcgtatccagacggtgcttggcgtaatagtctatcacaaattccccgttacgccccagcttgttttccgaatcgggattaacgggatgcatatatgccccaccggggcgtgtggcaggcaggtacagcaggttctcgcttccgagaactcccagcaggttcggagatgcgtcagccgattgttccacaaaagtggtttggaatgagtcatcgcccggagtaaaacaaagccgggtcggatcttctccatgatacgaaatacagatttcgtatgacttggcattggtcacaaagttccttacatcattgaaattcgacgcttctgttctccggttcttcagaccgtgtttgcctttttgctccgtcacgttatccgaagcaatcagcaaggcttgcagggcggtagattttcccgatgaattcggacctgcgaacaggttcagaggttttaattccaacgaacattccaccaggcatttataattgttgacagtcagattgtttagcataaattcagttcatgaataagtcggttgataatttcataacgcttataggtctgctttccgctatccacggagcgtgtgagagaatccagataggcatcattgcacattaattgcatataagtatcctgaacctgacgatggaattgttccccttctccgttcaatcttgacagaagataactgaaactctcaaagaaagccatgtttatcggccgtttcttgccgggtaacgaaggcagcctgaagccgcctgacggaagcagttgtatggcaagctccatggcacgtgtaaaccggctatccagttctttaaacaaaccgttttccggctccagctgattgagaaaacgcatcgttttccccaaaaaatcctctacattgcttcggtaatccagaggctcatgggtgtccgggtctatggtgatatgctgctgccacaaataaaaagccgtaaaacggagtaccagatacctgtctttcatatggttgtctggaatggaaccttctgtagcttcaacgaatacctctttcttggccagccggttgatcagtttcgtggcattgccctgatagagcgcattgcgcatctcttgattgttaagccgcgtcccgccacggttcacccggtcaaacaagtcaaaggtaacccggtcactggtaggtgccttaatcacatgcaaggtaagcgaacagtcctctattttattctgctccaacggagtcaaatctgcgaatcgggaaccgttcttgtcctttaggatagtgagtttgtccaaggcaaattcattgttgataaaactgaacaaggtgctcagacgctgcttgccgtctacaataagatacactcccttctcatcttccttcacataaatcagaggtagaggaatacccatcagtatggattctatcagctcgcttttctgtttggtcttccataccagtccccgttgaaaatcaggggtcagattcagcatcggaggagttttttcccatttccgcttcagttggaacacggaagccgattcgcgggctatatttagcactgcgtccggatatacggtattcggctcgtatgtctgctggttggaagccgtccgtatggtatattctccttcaaagtccatttactctccttttttcttcaacagatgcaaatatacgacgtttttttgatacatgacttgaaatcaattgccttttatggattgtcttatgatttttgatagaaaatagtaggagaatgtttttcttttttgattttaaatgatacatttgcaaaaagcagaccgaccaatcggtttaaaaacaagaatcaaaaagtttcattatgccggatgtgttcaagaatatagctgacgccgccggtagcagcagcgtcagacggggctttgccgaccttttttcagcctccaaggcggctttggacgagattcaggcgggtctgggcggaatccttccttccatgccgggtatgcctgtcgccaagttcggcgacctgtccatcgggatagacatgcatcctaccgttacccctccctctcccatcatgcctgtgcctcatgtaggcaaggtgtacgacctcatggcagacctcatggccggcatggcggctgccatgccgcctgcggctgatggagtggccggagtggcgtgcaacatcctcaagagcatggctccgtcggtcaaggtgcataaccagtggattgcgcaggcaggtatcggcatcgtgcatctgccggcatttgtattgcatccggccccgttggtcagcggtatgtccgagtccgagatgtggatgggcagttccactgtcctggcggacggtgcgccctgttcctccctcacacatccggcactctcatgcaacattgtgggaataccgacgattccccgcaaggggaagcccaggaaggtgagcaaggccctgcttgcccccacttccatgctctccaccatcacatccgtaggaaatcccgtgcttgtgggaggaccgcctaccattgatgtgtttgcgctggcgatgaagctggggctgaaaggattgtcaaagctcgggaaaaaaatatcccatctgctgcatggattgatagacaaggcgggattgaatccccggcttgccaggattctcaagaaaacagcttgcatcatattcggtgagccggtggacgctgctacgggcagggtctatcacaccaatgtggacttcgagcttccgggtccgattcccgtcgtatgggaacgtacctattacagtgatgccgccgtggacggtccgttgggatacaattggcaccacagctacaatctgggaatacggcagttggaggaaggggcgttcgcattccgtcatgctgacggacgggagtccttcctgcctgcgctgaaacttggagaatcccattttgaccgcagggaacagctggcatggacactcgatggccggggttacatgcttacggacatccgggggttgcaataccgttttgacggtcccgaaaaccgctccggttaccgcatggtatcgggcatttccacgaaggacggattccggctccgcttcgaatacgcttcggggggaaggctggcaggaatcatatcctcacggggagaattcctgaaagtggaaaccgacgagtcggggcgggtgctctgcgtttccgtaaatcaggacggtgaggaggtgaagctggtccgctaccgttacgatgaccggggcgacatggtggaaaccattgacgcgctggatgtcagcaaacatttcgtctattccggcggacacctgctggtacagcttaccaaccaagggggtatgtccttccattgggaatacgagggtaagggtgagaatgcccgctgtgtgcatacatggggcgatggaggcgtgatggaatatttcatccgttacggtaagggatatacccatatccgcaatggggaaaatgccgaaaccgaatattattacggtgaggacaaactcatctacaagatagtggatgccaacgggggaattacccgccgccagtacaacagctttcaggagctggaggtaacggtcaaccccgaaggctatacccgcaagacttcctacaacgagttcggactgccggtccggataacggacgagaacggggaggacaccttcctggactatgacaacaaccgcaacctggtctcgctctacactccgtgcggaaagaggctttcatgggactatgacggacaggatcgggtcgtcagccggaccacaccgggtggagaaactgtgaaatatgtctacgagggaggcgtgttgcgtaccataacggacggacagggccgggtttacacgctcacgttcaacgacaggtacgacctggagctgctgcagttccccaacgggctgttccgccggtgggagtacgacggcaggggaaggcttgtgcaggcggtggatgtgaaaggcaatgttacccgttatgcctacaatcgggcggacaacctgatacggctggaagaaccggacggcaacgtgcaccggtttgagtacgatgccatgggaaacatggtacatgccagcgacaacatccgcgaggtcaggttcacctatggggcgctgggggtgttgaaaagccgcgagcaggacaggcactggattacattcggctacaacagcgagttgcagctccggcgcatcggcaatgaggtgggcgacaactatttcttcgagctggacgggctgggacaggtcgttacggaaaccggcttcgacggtctgcggcgtgagtacgagcgcgacggcgcgggtcgtgtcacccgtgtgaaccgtcccggaggaaaatggacggaataccagtacgacggactggacaatatcctgaaggaggaacagtatgacggggaggtctccctctacacgtatgacaaggacggcatgctcgtcagggcgaaacacagcgagaacctgctggaattcacccgtgacaggaagacgggactggttacagaggaaaggcagggagaatacaccgtcagccgtacctatgacagcgaaggcaactgcacccgcatcaccagcagtctgggagcggacattcgtcacacttatgaccgggaaggcaacctgcagaccatgcaggcaggcgagagctggcaggcatcgtgggtgcgtgacaatacggggctggaggtgcagcgcaccttctccggtggcgtaaccgtcagcaccgagcgcgactgtttcgggcgcgaggtgcgcaagtccgtccgcgcgggcggcatcgagcgcggggcgtaccgctacgagtggggcgtcgctaatcggttgctcgccaaggagaacgagctgacgggaacggtcatgcgctacgactacgaccgtttcgacttccttatccggcaggaaaccatccagggctcggaaacggacgtgatttaccgcgtaccggacttcgtgggcaacctctttgagacaccggacaaaaaagaccgcaaatacggtcccgggggaaaactgttggaagacccggattgtttctatcactacgacgacgaaggaaacctcattttccgtgagttcaaacggttgcaggaaacgggcgtaaggtatgaccgcaagcgcatggagaaggagcgcggcgtccgctgtctggctacaggtacgggatggctctacgagtggagttccaatggtatgctaaagaaggttatacgtccggacggaagaccggtggagttccgttacgatgcgttgggaagacgcaccgccaaacagtatttcggaaaggtcacacgctgggtgtgggacggaaacgtacctttacacgaatggagctataaagccgttggcttacaatcggacgaagaggaaaacatccttccaaaagaaccggcagaagatgttaccacctgggtgttcgaagcaggcacgtttgtaccaacagcaaagatacaggatggtaagcaatattctattgtgtccgattatttgggtacacctattcagatgtacgatgaaaaaggaaacaaaacttgggattgtacactagatatttatggaaaagtgattactgtaaataaaggaatggagtttgattgtccattcaggtttcaagggcaatatgtggatgaggaatcgggattatactacaaccgttttaggtattatgaaccaagaattggtagttacatgagtcaagatcctataggattaaaatctggtattttagcaatatatagatatgttaattctactaacatagcacttgatattttaggcttatctcatgcttataaattaaaaaaagctatggaaaatgcctataggcctgttgctgctggacagactccacatcatattgttcaattgaatcggaataatgaatatgtaaacagatccaaagccgtattggaaaggtgtcacataggaattaatgatgccgaaaatggagttgctctatggggtactgctaattctcaagtaactcaatctggacatccaggaagagaagctgccagaactactggtacttaccatgcagggtacatacattcgcttgaaagtgataaacgaatatgtgaattattagagagtgctgagaaatatgcgatagacaataaattaagcgataatttaaaagacaattatgtcagaaaacaattacaaaaaattggaacagaaatagaaagtggaagatggaacaattcaacccattaattcataagtaatttatattaaatatcgacaattatgttaacagatttaaaattaaaaataacaagtttacaaaaaaagaataatattcttcttataaaagaatatttaaaaaatgtacatagatgggaatattcgaccaaggaatattataatctactaccttattatcatttacttaataaagaaaaaaaaggtagacttttaaaaaacatgaccattgaaaaatggaattatcaggacttgttcagatttggcttcgatgaaaataacaaaatgattatttcagagcaacatatagatgcagatatacgaaaaggtttatatatcagtttatatgaatattctaaacatggatataacaaaacctatttcaaatattacccaacagaaaatgaaaatacacccgtaattaatttaatatctatatcaaaatttgaaatagtaaataatgagaattcaatatatgttggagttaatatttatggtgatagttcaactatagaatacttttatgataataataaactcattaaagtcatcaaaacagcctcaagatggaaacataaagaagaatataacttgttttacaataaaaatgaagaactatacaaaattattttaggaaataccatttattggcaaaatcaaaaataaaacaaagcccccattaactcatctcacttagatatactatctttgtgacaagcaacaactaatatgttacaattcccaactgtttcatcagtatagctcaaaatgtccaaaaaaaattcaaccagttataaacgataacattatgaacatgaataatctaaaaggttttgtcttctatgtggatatactaggattttcagctttaacacaaggtaaaatccagcttacagaagacgattttaatatttggcaggtctctaaacattttcagacttcagggaatcaggaatttgcagccaatattttgatcatttttcggaaaatcttggcaaactgccagagtaaataccctacagtaaatttcacccagttgtccgattgcgctttcgtctggtctgaaaacatgaaagatgtcatactttcatgtcatactattatgtgggattgtttgcaaaatggtattctatgtcgtggtggtattgcatacggagatatcattgaagataacaacactaatttgggacaaatgttgctaggaaatgctgtaagtaaggctgtcaaattggaacaggctggggccaaaggctgccgtgttttaatggatcaggaggttccggcatttttacatgactatgattcatcatttttgagcaaaatttaccagttgttccaaccttttgagaatcccttggattaccaaatctatgatgaattcaaatggtattactcccaaagtctgaaagatttaaacacgactataggtataattcaggcaacagtcgaaagattatgcctcgctgcaaaattacaatatcatcccagatttaactggaatgtccggtctcaagagggtaatatccatgtaaaatcatccatgcgatttacttcagcaaatgaacagaatgtttttaatatagagcatacctttgattggaaagaaatggtagatttaaaaacacgaacagcaacaaattataaccgtatagctaaaaaaattcaaggggaagccttatcttgtaccatcgataaagaaggacgcataaagtttcctccagtaccatagcaactattgaacattttttatattatggacattttttctaaagaaattattatacctataacggcagccatactgggcattgccgttcccttgttaattggagttattcagcggatagacgataagtatgaatctacccgcctgatacaactctttatgaacgaaagaagcacaaagcattttcttggcttgctcgctattaccatatttttactgttctatcaattggtcgctccacctaactattttgatttcggagttcttacaaagtacatagattattctgccattattctcgcgacaatattctgtgtactgctaacattcagtatatttatgattttcaggcttatctatatctataatgtacctgaaaagctgcaaaagcatttgataaaaagaaacaatatcccacaagataccagaaaagcgtggttcgaactttttattgccatgctcaaacagaacaatgtggatgtattgcgcgattgctatcaggaattgtatgactggatcatatctttacgtgcaggtaaacaatggacgttaatggaatatccgccggagttatacgaaggcattgtctccattaatgagcagctgtgcatgcaacaaaaggaagcggtttccatcaagaacggaaatgatatagtcaatgcaatgctggatgattttcagttcaccataatgcatcagaatacctaccgtacgatttggacttgtttgaaccagcaattgttttacaagcgcagcgaatggattcttaaatattggggtgcagcccattcacacttgtttcttcatcttacatctttccaacttgatgaacgtataaacgttccctacacttcatctggacaaactgttgcaaacagccaaatggtagagcttaggcagaaagaacggaaagaatttaaggagtttcatatcgcattaggtggacttttgttatatagaaaagaatatgaacttttaaatcaaatattgtattacactaatagccaaccccctcattatgtactgattccaagttcactggctgaaattattccactgtatatggacttgctctcattcagtcccgattcaatgtacaaatacgagcaaaaatatccattttttggtcttcaggctggcgtacgcaacaatagcatcatcaatggctggatacagaaatacttgtatatcctaatgttacgtctggcaacacttaaccgcacctatgtttacgaggatttttattcactgccggctcttcctgaatccttatccgaaaagaacgaatggctggaaaatgttccgattatcctgaaacagattgagcagaattccattccactggaagacatcacaacaatactgccattggatcagtcgtgcatatacagggctaaacataagctgaagaatgcactggagtccctttccaattcgcttacttcaacaatacaacatcaaaaagttactcaacagctgtctgaagatgaaattcaggatttttaccaaatagcatcagatagtattggcagagaaatgaagtggattacagaagtttctgtcataactgatgatgagtacaaaagctgtaacaagttcaattgtgtcggaagaatacgtcagctgatgccggcagaggcattctgtacggataaaacaataggatatgtcaattttaaggagtctttcagtgctgctacactatactctttcaaaaactgctggctccgaagcttccagtatcagcctaaaagtgaatatagggtttttccggagaatcttgacaaggccttccagactttaagattgaccgacaaacagataatcatcggattccacttcaactggtacaatgcttatcctcagaatttacgaaaggaaaacgagtataagttcaaatcccctgacaacagattgttgtatagtctgcctggagatcatacagtcgaatttacaaatactgtgattattctcaacaagtcagacctgcccaaactgaaattacttgatccgccttccacactaaaggacaagtttcatttgaaatgtatcaatgaacaatacaagttatatgcctctgtaatcaaattatccgaaaacaaacctcttctgaatgaatatatcagttcgggagcatacttggaaaaagaattgaaacagatggcattggtttgtacagagctggacgcacagatactatggaagcagaatatacctgttgtcatgattaaggtgctcgaccgctttattgacagcggcaatgaaaatctttccgaaatccgtccgttcaatgccgactgatacacattcggatatcagaatgacacttctgactattagaaaaccatcataaaacatacaggttaaaaattggaaaaacaaagaattgggaagacctctatgttcactgcaaatgaaacacaacattcattaggtcgtttcatttagaaacactatctttgtaacaggtctatacaataaatatatgagtagaatcaagattaaaaacttcggtccgttgaaagaaacagcatctgtaacggacggatggatagatataaagaaagtaaccgtttttacgggtaaccagggtagcggtaaaagtacggttgccaaactggtttccacctttacatggatggagaaggtcttgacacggggtgatttcaaggagaaagaatttaccgccgccaagttcaagaacaagtattgcggttaccatcgtatttccaattatttcataaaggaacagactgagattttctacgaaggggattcctacaagtttacctacacgaagcaaggcgaacttgtcatagaaaagaatgagaatgcattggacagctatgcccttcctcaaatcatgtacgttcctgccgaacggaatttcatcagcatggtcaacaaaccgaatctgattaaggatttgccggatgccttgctaggttttcttacggaatatgacaaagccaaacaacgcattaagagtagtctggaactgcctatcaatcatgcgcaactggaatataacaaacaaaatgacattgtttatgtcaaaggtgaggactataaggtgaagttgatggaagcgtccagcggattccaatccatcgtaccgctttatttggtttctttacatttgtccgaatctgtaaaaagtcaggcgaatagtgcccagaagatgagcagcgatgaagcgaaacgcttcgaagcggaagttgcgaatatatggaacataccgaaccttacggacgagcaacggaggattgccctttcagccgtttctgccagattcaacaaatcggcatttgtcaacattgtagaagaaccggaacaaaacctttatccggaatcgcaatggatgataatgaaacagttgctggcttttaacaatgctttggaaacaaaccgtttggtagttacaacacatagcccataccttattaatagcctgaccgtcgctgtcaaagccggtatgctgttggctgtaggtaatctttcctgtgaggtacaagaaaggataaatgctatttatcccatagaagctgccatacaccctgacgaaatcgctatttacgagttcaacgaggtcgaagggacagtaacagtactggacacatatcatgggcttccttccgatgagaacttcctcaacaggatgctggagagaacaaacgaagattttgccgatttattggaaatacaacaggaattatgattgacttcttcccgacacaacatatatcatcatcaaacagacgcaaattcggtatatgcgaccggccggctcctgccgctgaaaaagcatatattgcagaaagacaggggcaggattggattgcggcagtggacaattatcctcaggtaaaggtgaatttcgtaccggttgaccattgcattgaactgcgcagggcggacgggagtatggacaaccgctgcgacggctgcctgttttatagagatacgattatatttgtagagttgaaacaaagaaaaggcaagggtaatcaatggataaaagacggcgaacagcagttgcgttctaccattggttattttgaacaacaggaagaggcacggaattttcccataaaaaaagcctacatagccaatagtgaaaaacctttgttcagaaccggtcaggcagtacgtatggaacgctttttctcggaaacaaactatatactgagaatcgagaacagaataaatattgaataattggttgaccctgcagtgattttcggcgaaaaacggaactccggtacgaaacttgatgcctacatttgcactgttaacaaaatgtttcacttaaaacctgttgatttatggactatatccaaaagattaagttgctgaacgagttgatgctcaatgcaacaccgcaaaatgtagatttcatgccgcaaaacggcaattattgtgtggcactgatagctacgcgacctgttcacacttggggataccaaaagcgtaacttcaagattaagggacgcttggaagaaggcaagacggtctctgccgatttgatagcggaaaatgaaatgctttttggcgtggaagacctgccttacgtggcccacgagggtgaccgtacccctatcttcaagataattcgtgcttccattttctgtgcttatgcggggttgcaacttacagacctgcattgggggatgcggaagattgcctggtcagattatcctttcaagagaccggataaggaagaacaggcaaaagcagaagtcagatttatgaaacgtctggcatcggtaatgactgttccggatcattgtgtggtaggacgttccgtggtaacccatctcacttccacccgtttgcgggatgttatgctgtacaacaaggagtacgaaccgtccttatatggaaagataaaggattcaatagaatccttatttccctttattccggcaaaggatcatgccgataatgtggttcccgatgtatttgtttcgcaacaggattgggaaaatcctcgtgacacttatgaacatcaggttatcatactcaatgccaaaagcaaaaagaaagaacagttctggtgggattacttgaaactcaatattttcctgagcgatttggagtattatttcggctactatattttgatgaaccgttggcagattccgatgattcagaggtggattgccgaatatcgcgaaaaaggtttcttcgagtcccagcgtgcgaaggattatattctgttctatttgaaagccggagaaaagacaccggttcgtgttttaaactcacagggggtgcaggttaagatgaagatgccttcaagataagccggtaacataatgtttctcatagggaaaagcggattatgtatatttcataggcatttctttgccgatagaatgcataattggcctttccctttgtttttatggtatatatttatacttttgccgtaaaaaataccatccggtcggtattttttagggatatggtggaacagggatagaatccggttgccagaagatggaataacaaagacatagaggaacatctctgttttgaaattccactttctgtttgggttcctctatgccgaacaaaccgactaatcggcttatttgaagacaaatataagcaaaaaataatatatgtataagaaaaaaaagaaaaaggcatcgttggcatttatttcataaactggtatgtatggtcataaatgatttaatggtaattgggtaggacatatttaattatactaaaaatgaacgtgttttcactcaaaagacctacttttgtatgatactaaaaaacaaggttatgaaaggagtaaaaggctcagaaacaaaaagattaatcagggaagctgcatacaaacagtttctgacaaaagattacaacacggttcccctgaaggagatagaaaaaagtctgaatttatcaagaggatgtatgtcatatcattatccaagcaagcaagaactgtttattgatgtgattgatttttacatttttcacaaacaagatgccaaaaataagttcaaggacatttctcacacctctctgcttgaatttattgattattacataaagaaggtggaggaaacgatgaatgcaatgaggatctatctcatagaaaaagagaagaccaatattacacgtgcatatcttaacttgattttgcaggcagaatatttctatccgggatttaacgaggctttcaacgaaataacaaataaggagattaaattatgggaaagaatatttgtgaaggctgttgaaacaaaagaaataagatccgatgttaatccttctacattggctttgacatttcgaatcctgctgtttggaaaatgttttcaggatgcattggtgaatggattgcgaatagaagaactgaaagtagttctttataatcaatatgaactaattaaaaattgaactaatgaagaaagatgtttttattactgggcttgcaagcttctttccgaactctcctgtttccaatgatgaaatggaagagttcttgggactcatttctggaaaacattccaaagtgcaacggatagttttaaagcaaaatggaattaaacggcgatactatgccttaaacaaaaatcaagaaatcacacatacaaatgcagaaatggcgatgctggctatacgtaagttgctggcattgaccaataagagccaaaaggacattgagttgcttgcttgtgctactgcgacccctgatcagattctgccttctcatgcgtctatggtacatgggctttgggaagaacctgttgaaatattctcttctgctggagtttgtctgtcttgtctgcaagcgctgaaaatagcttatttgagcatagctgcatcagaaaaacagaatgcaatatgcagcacatctgaattggtgtcagcaatgcttttatccaaaaacttcgatatcgaatatgaaagatgctgcaatttgggcaccaatccatatatggctttggaaaaggacttcctgcgctttatgttaagcgatggtgcgagttgtgcattattggaaaatcatccgggagaaaagggcgtatctttaaagattgaatggatagaaatggattcatatgccaatgaaacccctacctgtatgtttgccggagctgtccggagggaggacggtgaactgaaaagctggaaatcttttgaaagtcaggaattggtcgatgagtcccttatggttattaaacaggacattaaacttttagggacgaagttgatgccgttatggattagacatattaaatcatgtctgaataaacatggcatgactcctgacgatgtggattatgtaatacctcactcttcgtcaatggttatttatggtaatctcattgaagcgatgaaaaacgagagttttgaattgtacaaacgagagtggtttaccaatcttacctgggtgggaaatatcggatcgtcagcaatactggctgccttggatgagttctgttctacccgtaaactcaaatccggtgaaaaaatactgctgcttgtccctgaaagcggacgcttttcttatggaacagtgctattaagtgtcgtataaatttggaaataaacgataaataacgtatttttgcgctgttaaaacgacatagtatagtatcatatatcatcttccaaacgaaaagtggaaaatttcaaagagacaagatggaatatgacagcttgcgctatattaaaatatatagcacaggtgcgtcacttcgtctctaggtattccactaccatgtttggatgttgattgcgtctgtgctatttttttataatataggcagtaggatggacccgaatttgaaacagcggattatagaggaggcatacaggttattcatcacaaaaggaatgaagcagacctcattctgtgatgtggctgttgccgtgcataaatccaaaggggctgtcatacactactttccttccaaaaagaaactgattgatgcggttgtcagaatgcgttttttccccgactcgcagatttcttgtgaaatgtattctttggctgacaaggattggaatgagtttttaaggcaatacagaaatccgatagaacgggtgataaacagttttcccgaacatctgaatggcaatctcctgatatgttatatgcagtttgtttcctccgcccatgaatatatggacgaatttccacaaatgtatcagcaacttcttgtccgggaacaggactttctttccaatgtggcttatggtcataaaataagtttgaaggatgccaaggcgttcagcagacaggcattgaacacttctattggtaagactttcttggggatgttctcagaaatttaagcccgcattcctttccttttcctccctttcagttcattccgttgtcttttagactgataaatgataaaactttacttgctggaacctgttttttttcattattcttggaaaaggcttatctttgcaaaataaaccgactggtcggtttattttgcaaagaattttaatagaatataatgaattaaaaagtgaataattggaaagtaggaataaattgttgaaatctttgcgcctgcaaccgcttcttgccaaaatagcggtaggatatatggccaagattgtagtcataagtggtattgcttacgttggcatctgcgaatggaaagagactaaggctagggaaatggaagtacggatgattaaccggaaaaagcatgagataaatgatatatacgtgaaaatgctcaggctttctttcttctgtgaaacctttatggagtggagtgagcaggattttttatcatttcagaaacggagacggcacattgacagcctgttgtgtagcttgaggtactcctcttccggctcacatacagacagcatccgtaatttgtggagagccaaggagcggtatatgcgggaaatcatatattgggtacacaggcaggaggaagccgaccgggaaattgcagcgaagattccggccattgccagacagagtgaacgggaaaatgccccaaaagggggattcctgaagaggttgttcgcaaaacgccacagggcggattctccttctgccgcctccatgcttcatgagcttaatcggagcgtggttggcagacagcaggcgtatgcccggaagctggcagaacggacggacagcttggatgggatgaacagaaggctgaatgtgcagttgcggcagatgattgagaatatggatggaacggtacaagcggacttgaagagacaggaagaagaagttgcggaagccgggaaacggtcatttgccacggtcatcggtctgacggcattcatggttttgctgctgatatggtcctatatggtgatacaccgggatatgatgcgtataaaccgttataaaaaaaggctggaaggcacagtccgtcagttggagcagaccgttcttgaaaacgaggaactgattgaggcaagaaagaaaatcatgctggccgtaacccatgacttgcgtgcgccgcttgcttctatcagcagctatgcggaattgctttccacggaaagagaagtgtcgaagtgcagggaatacagccggaacatacggcaggtggcgggacacatgtcttccatgctgaattccctgttgggatttttccggttggagagtggcggggaaaaggccgttcctgtcccgttcaggttatgttccgtcaccgagattttggaaacggattttatgccgctggcggcaggaaaaaaccttttgctgaacgtgctgagtgccggagatgcggttgttataggagatagggacaggataatacagataggaagcaacttgttgtccaatgcaatcaagtttacggagcggggaagtgtaacggttcgcacacaatttgaccagggcgtattgacgcttatcgtggaagataccggcaccggaatggacgatgaggagcagacacgcattttcactgcattcgagaggcttcccaatgcgattgcggaagaaggggtcggactgggactttcaatagtaaaaggtctggtcggattgttggacggcaggattgaagtggcaagccggaaaggggtgggcagccggttcactgtctgtcttcctttggctgtggcagaggaagcgatggcggagagcggcaggagccggatttccgtacggtcctatacggtactggtattggacaatgacaccgttttgctggcggcaatcagggaaatgtttgcgtatcacggggtggcttgcacggtatgtgagaacacgcgtgatctgatggagcatgtccgcagccgtagttatgaccttttgattacggatttgaaaatgccccggacaaacggattcgaggtgttgaagctcctgcgcatggccaatgtgggaaattcacggagcattccggttatcgcgagtaccgcatcgggaaactgcgatacgggggatttgtatgcggcagggttttcgggctgtttgaaaaagccgttttccgccgaagaacttttgcaggtatgtacggaatgtctgggaagtgaaaggcagtctgaacagatagacctcgatgccctgctgaaatatgggaacaggcggaagatgctggataccctgattcgggagaccaggaaggatatggaggctatggctgaatgtgcagaaaagaatgatcatgaggcactgaaagaatggatacatcatctgacaggctcatgggagatcattcatgccggcaagccgctgcatgagttgttcgcactgcttcaggattcgggagagttttctgtggacgagttcgggcggactgtacagcaggtattggaaaaaggaaaagaaataatatgtttggcacaacaggctaagaaagcttatgagagtaattgttgttgaggacaatgtcttgttctgtaattatatctgcaattttttgcagaaggcggatttggatactgtaaggacttacaggctggcacaggctaagaaggtcattgggacatccgtccgtgaggatgacatcgtattggcggatttaagattgcctgacggggaaagtaccacgctgttgcagtggatgagggagaacggctatatgcacccgttcatcatgatgactaattatgaagagatacattctgcggttcataccatgaagctgggtgcggaagattatatcctcaaaccgctggttgaaaccaggctgctgcccgtaatcaaaaaaataaggacggtgaacgaggctttcaccaaggtaatctatgaacgcaaaagcacccctttttgcgagttgaaccggtacattcacatggtagcgccgacggatatgacggtactgatattgggaagcaccggaacgggaaaggaacacctggcaaaaaagattcacaggcagagcctcagatccggcaagccgtatgtaacggtcgattgcggcagtttgtccaaagagctggcaccttccgcctttttcggccatgtcaagggggcgtttaccggagccacagaggaaaaggcaggatattttcaggaagcgcagggaggcaccctgttcatggatgaggtggagaacctttcgatagaaacgcagcggatgctgttgcgtgccatggaggaacggcggtatcgtccggtaggcggacaacgggacaggctgatggatgtgcgcatcattgcggccaccaatgaggatttgcaggaggctgttgcggaaaagcgtttccggaaggacctgctttatcgctttcaggattttaccatcaccgtacctgcattgcataattgcctggaggatatactgcctttggcggattttttccgggagcaatcttgcggattgctccggaaagaggtcttggattttgacgaaccggcaaagaagatgctgctgggatacagttggccgggaaatgtacgggaactgaagcaggtcattcatgcggcggtattgatatgcaaaggaaaactgattacccccaattccttacggctccaatatgcgggagagcccgtttctgaccccatggggaaagagaagatagacaagtgtttgcagaaagatgaaagaagaaacatagaacagatcaagacggctctttccatctctaaagggaacctgacacaggcagcggccttgttgggaatcagccgcccgaccctttacaagaaaatgagcctgcacggaatttccagataggtttgtttgcgatacagttttccccctcatcaaaggaaaatcgaatttgtcttgccggccgcatttgccgaatcttttcgtggaaattttccttgcggcttcgccgtggaaaattttcacgaaaaagaatgcggcggcaatccagattcgatttgaaaaacgattacaggggcaaactgcgaccgatgtgacgcatggataaaggatatgggctgcttgaagaggccgtatttcataatccatgaaattccacatatccagccggaatacaggtcttatgaaagtcttgctgtaaaaaagcggaaggcatgagaagacagggggcttcagctccctctgttctgcatggttttgtcttgcctgcccgcctgctcttttctggtgtcggatgcgcaggctttttcccttctgcctcacgtatcttctctctttccgtttattcacttcccttcttctccgttcacggtttagccgttgggaacagtcatgtttatgacatctgacgacatttgatgacatctgatgacacctttttgaaaatcagcatattatttggaaataccccatacctttgaagcgtcaaagcaattcattaacccctaaaagaaaaggtatggcacaagaaaagatcccgaacgaaaagcccaaacggacccggaaaccgaaggccggaagtgatgctcttccggtggaacagattacggaattgatgcttgttcataacaagaacgatccgaaattcggtgtacaggctgtcagtgaaattgacaaggacggaaaagcgaagacggttccggcggacgagaagaatgaaaactcattcctgaaattcgacaagaattcgagtattctcgaaaacttcatcaagaatttttggagccagctcaaggaacctacccatttccgcctgctccgcatgacctaccacgactacaaggtgaacaagcaggccatcagggatttgtcggagggaaagcagacggatgcggtgaaagagttcctcaaacgctacgaaatccgtccgagagaaaacaagaaggaacaaagtgtaaaccaaaaagaaaaaacagctatggcagacaaagagacacaaccgcaggaacccctgcaacagagcgaagtacagcaggcggcacagcaacagcagcagccccaggctcaacaggcagcgcaggagtcgcaaggaccgcgttaccggtataatgagaacatggtcaactgggaggagttggaaaaggtcggaatctcaaaggcttcgctggaacagcagggactccttgattccatgctgaagggctacaagaccaacaaactggtgcccctgaccatccatctttccggtttgctgacagccaaactggatgcaaggctctcactcatcccgcaacaggacggacaggtgggactggccattcacggcatacgcaaggaaccgcagttggagcgtccttatttcgggtttaactttaacgaggaggacaagaaaaacctgcgtgagaccggcaacatggggcgtgtggcagaactcaacctgcgcggcagtgaatataccccctgtctgatttccatcgacaagagcaccaacgagctggttgccgtccgtcaggagcacgtttacatcccgcaggaagtgagcggggtcaaacttaccgcagaggagatcaggctgctgaaggagggacagcctgtcaaagtggagggtatgacttccaaagcaggcaaggaattcgatgccacactccagtacagtgccgagcgcaggggactggaattcatctttccgaaaaaccagattttcaacgaacgttccatcggaggcgtgcctctctcgcccacccagataaaaatgctcagcgaaggacataccattctggtggaagacatgaagttcaggaacaggaatgacaccttctcgtcctttgtaacgatagacaaggttacggggcgcccgaactacacgcggcacaatccggaaaccggagagatttatattccaaaggaaatctgcaacgtgcagctgactgccgaagacagggaaaccctgcgcaagggacagccggtctatctggaaaacatgatcgggcgcaacggggaggaattctcctcgttcgtcaagctggatatgaataccggcaggacgatgtattcacgcacgccgaacggattcaacgagcagcaggcaccgcgtattccggcggaggtttacgggcacgtgttcacggcacaggaaaaagcgaacctccaggatggcaagactttgcttgtcgaagggctgaaaaacaacgggcagaccttcagttcctacctgaaagtcaatccctattccgggcagttgcagtattttcaggaaaatccggacatccgcagggacacttcccgccgtgccgcacagacggagaccgcacagggacaacagcaggagcagaagaagggtgcatcgcaggcagtatagacctgcccggagagaaacagaatcaatcatacaaacctaaaaaaacgaatcgtatgaatacggatcagaatacccgtcatatttataagacggaagatatcgactgggacggtctgaaggccgcaggtatcagtaagaaacaactggaagcggaaggcaacatggaactgttgctgcaaggaaaggaaacgggcatcgttccgctgaaactccatatttcggtcctcagcctgacaatggatgccacgctgaagctggtacccgacggcaacggcagaccggttatggaaataaacggtctccgtcagaaggaggaggcggcagtttgaccgggaaacaataagtataactcacgttccgtgccgttcctgacggtacggaacatcaaaaggaaaaagaatatgatagcgatagtgactgacaagcccaatgtgggcagagagatagcaagggttttgggagctgacagaaaagagaacggatatatgagcggaaacggatacatggtaacatggacatacggcaacatgctttccctggcgatgccgaaagataccggtacggcatgggtggagcgggagaacttccccctgctgccgcctccttttctgacggtacggcatgtaaagacggacacgggatggaatcccgacatcaatgcggtgctccagttgaaggtgatagccggggtgttcgatgcgtgtgacaccattgttgcggcaaccgacgcttcccgcgagggggaaatgctgttccggtatctttatcgttttttgggatgcaggaaaccttgcctccgcctgtggatctcctccttgacggacgaagccattgccaaaggaatggaaaaccttcgtccctgcagcctgttcgacaacttgtttttggcggcagacagccgcaacaaggccgactggcttcttggagtcaattcgagctatgccgtctgcaaggcggtcggtttcgggaacaactcgcttggaagggtacagacccctgtattggcagcgataagcggacggtacagggaaagggaaaatcacattcccgcagacagctggcccgtattcgtcagcctctgcaagaacgggaagataataaagatgcggcatgtggaagatttctgcaaccgccgggatgccctggaactttacgaggactgcaaggcggcaggatatgcccgtatcacggcggtcaacagccggactgaggaaatcaccgcacctgccctttataacctgaccgggcttcagaaggatgcgaaccgttaccataacctgacagccatacgggtgcaggaaattacccaaagcctgtatgagaaaaaactgatctcctgcccgcgcacttccagccgtctgctgcccggagacgtgtatgacatgttgcctccggttatggaaaagctgctgtccggcaaggaattccgtcaatatgccggtatgatcgaccttgctgcaaggaaaggcgtaaccggaaatcaggacacggcggagcatcatgccattgtcatcaccggcatacagccgggggaactggacagggaggaaaggctggtttacacccttgttgtcggcaggatgcttgaaacgttcatgccgccctgcaaggtggaatatacgacggttgaagcggtctgtgccgcacgcaagttccgaatccgtacataccgtattctggaagcggggtggctcggtatctttcagagggaacggcttgtcgcggaagacaacgacctctgtcccgtaccccctgaactttttcgggaggagaagctgccggtaacgggatgcagccttatacacaggaaatcgctgcccgctgccccttatacggatgaggaactggcggactatatggacaagaccggtctgggaaccgcatccacgcgcacgaatatcatccgtacgcttctggagcgtaaatatatccggtattcgggcaaatacattatcccgaccccaaaaggtcttcttttatatgaaacggtacgcggaatgaaagtggctgacgcctccctcacctccggctgggaagcggagctggcacggattgaacagggagaactcacacagaaagaatttctggatggcgtattggaaacggtaaatgaggttaccggtgagattttccggaaactttcggaagatggacagccgcatggttccatatagacggctgggcggaaggtacggaacagaagaggtgcagactggggtctgtgcctcttttttatatatgtacaagatacgtttttccgcttttaagcggcaaaggtcttggattgcctcgtttttgccgcaaggcggcccctttcaggggctggtcggctaaaagaaaatcatcctcgcttcgctgcggtattttcttttgccaagccttgcgcaaaaaggcaatccaagggccggaggcctataaaatcgggaaaacatatcccgatgggattattcattcttaaaaatttaaagacatgaaactgaaactcatcgaaaacatctgcaggcaagtggtcgcactggttctgcttacgggaatatgcctgctttactgcaagggcgtcattcccgtgtacctgtctgtcctgttccttatgtccggaacactggtccgtctcgccttcaggacattcacctttgtcttgaaaacaatccttgtcctgattgtcatgggcatgcttgtataaccatcaaatgcagaagatatgagaacttacacatttacatcctcggctccggtcatgccggctgcatggcctgccacaaaccggacaacacctgtcaaaagacagcctccctgtacgacagacgggcccagacgtatcggctactatctggaaccgttgaaaggcatcgcctcgaatccggacaggcagagaatcctgaaggattttttcaaggaaacttatgtataacattttaaattttaccattatgttttttcaagcaatcaaccaaatgattacggcaggcacagacctgagtatcaacatcagacgggtaaacgacaatctgacggttgccgtcgttcccagacggtcgggagtaaaggccggcgaacgcattgtcccgctcatcctgaacggtacgccggaagaactggatgcaggattcctgcaggctgtcggtgcacccgtacagaaagcgcaaggtatccttaccaacctggaatcgttcgagaagcaggcagagcaggcggtttcacaaagcaaaacctccaagcctacggtggaaaaggagtccaaggaagcccgtgaaaaacgggaaaagatggaaaaactgctgaagaaagctgaggatgccacggcaggaaagcattattccgaagcattgacctggctcaggcaggctaaggtactggcacagccggacaaacaggcggacattgacaaaaaaatggcggaagtgcagaagaaggcatccgagggaagtctgttcgacatggtacagccgccggtaactgatccacagccatccttgcagcaatcggctccacaaccgatggcagcccagacgccacaataccggagcgaagagcaagttccgatgtccatgcccgaacagcctgccccggctccgcaacccgttgcacagccgcaagtacagcccgtacaatataggcaacctgcaccgcaaccggttcctcagcaggctgctccacaaccgcaagaaatccagttccatcaaccggtacaggtgccgcaaccgcaattggcggacaatcgctggatgcaacaaccggctccgtcacagtatgcaacggtgcaggaggctgcaatgtataacttcgacaaggattacgaggatgaccgggagctactcagggaggacccttatgcggaatatccggactttccgaaggaatgccgcatgacggatatggcacaaatggatatggtatattgttaaaccctataaaagaaaaataatatggcacttgaaatcaaaggattgcagagagtattcaaattcaagaaggactccgtggagctcgtgttggatgatccgaacagcgaactgtccgtaaacgaggtgatggacttctattccatgacctaccctgaactgactacggcaacggtacatggtcctgagtgggaggacgacaaggcggtttaccgcttcaagacaaccatcggagtgaaagggtaagcggtatgaacaagaaaaaaaaggataaggaaacatgcagacagctttcagaacaagccaaggatggactggcacggctgattattctctcagtaagttcgtcccacatccgaaggggaacctcggaacggaaaagaaggatacttctgccaccgggaagcacaatgcttttctgaccggtagaatcacaccccttgcaccggattattggcatcaggatatggataatgattctccggtcaatctcacgactccggaaaattttgactatctctaccggtcggcatcaagatatgcggaacttatgggtataaaactccctttccgatacaggaaagggggttgcccccgcctgaatattaccgagttgtacagagttatggaagagtgtgtaccggagtgtatcaatctggaaaagaaggacggaaggctgcatttctgtctgttccgccatcatgactggccggaacctactttgttttggattccggttgattttaccgaacggctttcggcatcattgaagaacattgtcagggagttcatccggctatttgtccgacaccacagactgtacgatattactgagacattttgttatgactttgccatagaagaactggaagactggggaaaccgggattccgatgcttccccgaaggaaatcagggcgaacaaacggctggcagattcctatcagtctggaaaacggatgaaagcactcagacggatgtcgggcaaaccgttctgcaagtctttggaggaggctgtgcggaattaccggacaaaaaaggaaaaagagctgaagctgttggaactgattgaggacggcatggcattgattactccggaaagcccggtattgacaggctaccagtacgattgggcttatgaagaggaatgcgattttcccccggtgggaatggaaagccaggtcatactggtctattctgctgatgatacattggcggagtgtgtcaaggggtatatgaattcggattatcaggaaacctatgcccttactccggtcacttacaagctactgacaccggaaacggacagtctttttcagatggatgactatccggaaaggctttccagatggttggtgtgttttacaggctatattgatgacaacttttaaaacgaatgacatgaatgaactgactaagaaacttcaacaggtgatggttcccaaagcggcactgattgcttacgaatacagtgatggccgctatggacacgggacatattatctcgaactgcatccgatcaacgacagaggccggatggaggctgccgtccccgttacgtatgaatttatggactcccttgtggaatactatacggataaccggcaggatgtaccgcatgggaaaatccccaccaatatgctgtggtgcgatacacgcaagggacacgagaggtacatctggtacaatcctccgggaaaacggcagatgttcttttccgaaaggctgaatattccggacgggacattccatgtacccggtgtcatttacagggcttccggtgacagactggaaatttttgcctataagggagaagcaccggcagaagacagcccgcttttccttgccccgtttttcaatgtaacgggaagcagtgtctgcctgggaaatgcctcgttgactcctccggaaaacatgactttctcaaaactccttgagcattgggaaaaacgcttctggctcagtgaattttcccatttgggaggaagcaggaatcccaccgaaagcaatctggtttcggtgacggaaaaggcacggaccaatccgtttgactataacgaattgaaacctatggacagacaacttaaagacttattgatatgaaaaagattcattatacagacagatacctgctcaatccccaccatcccgtaaccgttttcgtaatcggtgcgggcggaaccggatcgcaggtggccaccaatctggcaagaatgagtatcgcattgcaggcactcggacatccgggcctgcacttgacggtttttgaccccgatactgtcacggaagcgaacatcggacgccagttgttcagcgaatccgagctcggactgaacaaggcggtggcacttgtaacccgtatcaaccgctttttcggcttttcatgggaagcaaaagggcaatgctatccgtcaggaacatcagattccgttttggcgaatatcatcatcacctgcacggacaccacccgttcacggaccggtctgtggcgttttttgaaaaagcatagggaacgttcatacgatgacgagaaatcaccgatatactggatggatttcggcaatgcccagaccaccggacaagtactgataggtaatgtcaaaagcaagataccgcagccctcctccactgaatacctgcctatacccaagatgaacgtcataacggaggaagtcccttattccaccatcagggagaaggattcaggaccgagctgctcgctgactgaggcattgcaaaaacaggatctcttcatcaattccatgttggcacaaatcggatgcgacgtcctgtggcgcatgctcagggaaggaagaacgttctaccggggagcctatctcaatcttgacacattacgggtaaaccccatcccggtatagaacacaaacgtcagtttctcctgatacataaaacgatgtataggagaaactgacgttttggaacactcctgctatgcggtttaatatttcagccgtacggcatttgccactcccttttccgtcatgaccagctcataccggtccaacttttcatagagtttgcccaatgtcttgcatccatatctcctgaccttgaatttgggcatcatttttttcaatgcaccgccgatcagtgaaagggaaacctcttctttgccgtcagccgcctgctcaaaagccttgtcgaaatactccatatcccttcggataaagaattcgggagtgttctcctctgccttgctttccttccggtcggcatacaggaatacggaacaggaccgtaccaatgacaccggggtctttccttccccatatcccagcactttcaccccggcttcccgtatccgttgggcaagcaggctgtaatcaccgtcactggccaccaggcagaaacagtccacctgcccgtcccgaagaatatccatcgcatctatgaccagtgcaatgtccgtcgtgttctttccgggaacatgggaggaagcttgtacaagcctgaatccatgctccctggcactttccttccatgcggaaagcgctttcctcgtccagtctccataaattcgtctcacaacggcatccccgtaacgggaaacaaagcccattatatcttccatcctctcaaaggatgcgttatccccgtcaataaggactgcaacggtatatcttgaattggcatttgtcttcataacaactgtttatgaaacaaagttagcataactttcccatgttggtattcccgcccttatcttttttcccacgtttctgtaaaaactcctgtatttccgagcttctgtagaagtttttcccgttatcgtccgtctggtaataacggatcagccctttttccctgtaacgggcgactgtccgcaatgacacgtttagcagtttggcaatgtcatagttgtccaaaagctcgtctccattcaggcagtccttcacgcgtcccatcctgtccagtttcttttctatacggtcaaaaccttccactatggtcattatcattttttcaagcacttcattgtctatatacatcatggcaattttctcctgtctttttaaaggttattactggaatacccttttcttgtgcgcactttcaagagtatatgccatgttcagtgaaaaatgtatgccacattatccgtttatattggacggggaattatataacactgcaaatcaataaaatacagatataaaaatagtataggggaaattgaaatgtaaaaattcgaggtgtaaaattgtaaaatccgaatgtaaactttacaatttacaggtcgtcagaccttctccggatcaggactgatagatggcgtttccataccaggcgttttacttttgccggcgaaggcatctgaaaggtacgggcaagaaatacagcaccttccactttggcaccggccctttccagattatgggcgtattccatcaggctggatccgctggtcagcaaatcatcgacaatcaccacgcgctttccgtacagatcgtttgacatcatatagttggcggtatttatttcagagcgtttttctgaggcgtgtttacactccctgctttccgtaatgcatattaaatccagtcctgaacggacatagccatgcgtttccagaaaaccggcaatacctgagaaacgtctgtaatagcggtctgatgtgctgcacggcataaacatggcagtaatatcctcatcagtggaaagaagcaggaatgcttgtgaaaaatattccgtacagctgtcttttccatccttgaaatcatatactttttgcacgaatgccaactggtcatcacaaagccagctttcaaagcgtttgggaaaataatagccggcaaacacgcagcgaatgctcccgaatgagaacaatcgcaacggacggactttatcaaacagctcaggacaagtcagcgcatataacagcggtgcatgaggatttcctgctatgatggcttgacgtagcggtttctccctgtcttcccgctcatcgtaggctgctgcatattggcatagcaccttgccgcacttttttctccagtattgtccgtatatccagagaacgatagccgttagtaataatgttgcattgattatcagttccatatttcctgtttttttattttcggacagattgtccgggataaaaatactgtttttccggtaaagaaacagacttttagccattcttttaatttgcttccccaaacagagcggtctctgacatctgatgacatctgatgccgtttgatgacatccttttgcccatgacttttacttcccgtattttcgtgccggacaaaaaaagcagagtttatggaatttgtatgtatcgaagctaaggcattcatggaaatgaatgaggctttggaagccgttgaaaagagaatgcgtgaaacatgcggaggaggcatctgtagtatggatgactggattgataaccaggaagcgtgtatgcttatgaatgtctcgccccgaaagctgttgcaacttcggagaagcaggattatcccttacagccatatagaccgcaaggtatattacaggcgtcaggatattatacgttatttggaaaacagtattcaccatgtaacccccgaatccttatgactcaattcatactgaccaaagaaagccctgagattatacgtttttttcggaacataagcaccctgtccaaaatgctggatgatcaggagaaaaaccttcgtccggtcctgaacggagagcgttacattaccgacagcgagttggcggagaaattgaagctgacacgaaggacgctggctgattacagaatgaacggcaggctgccctattacaaagtaggaggcaaattattatataaggaaaaggacattcttgttctgttggaaaaaaacagggtggaaacatttgatcattggtaatacccgtttccaagtatcacgacataaacataagaaagtcatggaaacgataaaaagagagggtttcatggctttcttattacagaaccggcagattatacgtttttttattttggaatcatatatcggtcagcatttctatttcttacatgtaaaggtagccttttgcttctgatgcgcaaggcggtccttcggactggttggctgaaaaaatcatcctcgcttcgctgcggtattttttcgccaagccttgcactatcagagcaaaagacaaatgtctgacatgtaagagatagaaataccggctttgccaaagccggaaatgtttaatcacaaaataaggaaattatgattcagacaacaaacaagtatagcaaagaaactttcatccgcctgaactactggtatgatcggatatatggacttgtacaggaagatatagataaagtgaataccatggtggaacacatcgaaaagacacgctccggccagtatccacggacaggagacaacctgttctttgtttccggttatggtgagcgttcccggctgttctttatagatgccgtatatggagataacattatactccgggatttttcccgtgttccattcgtgtcccgtgacaaagagggtatcaaatgcgatatgcatggcggtgagtgtctgttggtaaaggcaggcgatgtaaggttcaaggcatggactaccggccgtttcaagcattgggggcattacggggcatgtgaaaacggggaggtttactacgatgcgaaaatagccctgtgggagtgtggcgcacctgaacagccggaaagccgggaatggttcaaaatccatatccgcaaaaacacccggccgagcgaggatatgtacgtcggagaaatatcctgtaaggatgaggatggactcaaacagtttgtcaacgaccatgaaggtaccatattcgcagaagaggattctcaggaaatggtcatgctgtgtttcaggcattccgacatgaggatttccccggaagaatgggaaaagatggattgtccggtatccatgcgtgagatatacggacagatgcatgaagtaaagattgtaaaagaccataaaacgcatctgaccacattctactattaacatagtatcaccacatgaaaaatcacccttgtttcctcctgccacatatgacaggaaagaaacaagggtatatcatcaggcagtcttttcaatacatctattagatatggagcagattgttcttcctgcacaaatattcattcagatccttatatccggaatattcatgcgaaaaatcgcatatacggattccgtatttgtcctttaatgcctgcaccgcatttttcccggcggtatcattatccagacagcaacggatgccgtcatattgtgaaaggaaagaaaaagccttctgtaagttactgacagaattcaacactatataatccccctcttccaaagatggaaaagccggtctgaaagacagaaaatccataaacccctcaaaaatatagcaaatcctgctttccggcgtgctaatgatgcgactgatgtccttgggagcaatacaagccttgaaatacctgttcctgatttcgtaccctccggaaatattagggaaagcgatggcaaaataattcttcccattccgtttaaaatgggcttccctgcatatttttcgggcagtttccagatcaatgcaccgttccttcagataagtaagcagtatccggttggcaagaggaatgattttcaaatcttgaaaggcgggatatgccttttcaaacggacaggaaacagtaaccggtttcagtacggctcttttatcctcaatacactgtagtacataacctatatcttgtgtccgataaatctccttggccaacgttataatatcccctcccttccccagaccgaaatcataccacaattccttatggaggtcaaccttgaaagaggcttccttttccgtcctgaagggcgatttgtaccatacgctgttcccacgctgtattaccggcttgtatccgaatccggctaaaaaatcaacaagcctgatgttctttgcttcttgtatgttcatggcatctcattttcatggattagttcactattaatacacgacaaagaaccgctttatatccgaaacataaaaagcagtgtcatcagatgtcattaaaagtcatcagatgacatcctgtatatcctttttacatgaatggctcaaaaacttttctgttttggcatgcacacctccttcatgcagcaatgccgcaaagtatgataaaggcatgaattataagtaaaaaaactgtacaaaataatatttatggagaagttatgacattctgaatagtatctgtatatttgtaaaatccaataacacataatatatttgaatggtataatctgtagacattatatcgaataaggttttagggtattgataaccaatagccctgttccttttcagtataggctctattttaatacagtggaaatttaaaatgttgactgccgctttactataaactattaatttaaaaaagtatttatgaacaacatgaaagatttgattgcgttatttgacaaccacaagatttatgatacggatatatggacaaatttccttattctattggtgtttacagatttgtatttaggtgtgtgttgtccccaaaaagaacctggaattacgtttcaggatttaactctaataaacctgattccattcgtaatattaggtattgtctgtatttggactgtgaaattttttacttgtatcctctttgcattatgtacactagcagtacccttaattgggaaatatatttttctatttaataatgaagaagtttcgatatttacgttgaaagaatatgcaatgaaaaccaataatactgtgattgcacaaattgtaagcgatatagagatacaaaaatcaagaaaggtaaagagtgctttaggaaaggtgggagctataatcttatgtttagtagatctctttgcaggtgccttcatgcccaagtcagttccaaactttttggcgcctagtgaaatagtcgtcatttgtatttttgctcttttagtgcttttggtttattcatgcaaaataaagattcaaggggtatatctttctaatgatttgcgaagcaaaatttccaactttaaagtcaacaccccaaacaataaataaattcttaatgcatttgatttagcacatgtttttatttttttctcttgttgaaaactataattaaaaggaatgaaaatatttgcagaaatcgaacctgtgtattatatttgcagtgtcaaagagacaaattttgtcagattagtaaagaaaaacaatgaatttagcgtaaggccaattcaatggttttcataaaagataaagcaaaaaatgtgcagtcactcaaggagttagaataaaccgaagcaaaaggttcgattcctggtggcaccactaacgattcggtaataaaaaaatcccttgaacttttgaagttcaagggatttttttattcctcgtattgcaatttgcaaccgcctatactttagaactatgcagttttttataaatctccacacgagcatctatttctgcttgagtcaaatgcgcaggaagttcaatggtagtccgcggagttattgctaccaataccatatcccccaaaccctttttatactctttaataacattttcagtaaactgactggatgaaataacatcacgcattatattaccttttttcatatctctaattattttgttttttattttacacacaagcagaatatacacttccctatacaggtttagattgagctaaatcttccgatgtagatttgttttccaaagagatattgatcgcattcatgcctttcactccacgctcaaggtcaaatgttacgatattattttctgcaatattgccaatgacattgttcacatgaaaaaagtatttctcaacacctgaaaggtctttaataaagccaaatcctcttgactcattaaaaaactcaacccgtcctctcaagatcgtcggctcctcttcttcctttttaggagttgctataattatttcatccggattaatttcttccttctttatatcctctgtcggaggagtcgaagttatcattccgttctcatctacataggcaatcatatcctcaaagctatttgagctgcccgataatttcttgctttctttctttttcagtttttcttctcgtttagcgagtcttttcttttcattttcacgtttaccaactgtcatggattttgccatagaatttatatttagttttatattaattttaaagagattgttatttgttgatttcaaatagtataactggctttattcagcttcttacccgtcagtttctgaatatcattaacgagtttacgctcttcctgcgagcagaatgtcagtgctgtccctgtattcccggctcttccggtacgtccgatacgatgcacatacgtttccggcacatcaggaagatcatagttgataactaaaggaagttcgttaatatcgatacctctggctgcaatatcagtagccaccatcacacgtgttttgcccgacttgaaattgcccaaagccaactgccgcgctgcctgacttttatttccatgaatcgcctggctaccaattcccgccttgcccagtatctttacgatcttatcagcattatgcttcgtacgtgaaaataccaacaccgactgatcttctgatttttgcaaaatcgaaaccagtaaaagactcttttcctttttctctacgaaataaaccatctgttcaatagcatccacagtcgatgatttcggagttatgctgattcgtacaggattcttcaacaaagaattcgttaaagaaataattgtatcaggcattgtagcggagaagaataaagtctgtttttctttcggaagttttggtaatatccgcttgatatcatgaataaatcccatatcaagcatacggtctgcttcatcaagtacaaaatattgtatcttatccagatggatatgtccctgattcatcaagtcaagcaaacgtcccggtgtagcaaccaggatatcaattcctttgtgtaacatgtcaacttgaggacgttgatttactccgccaaaaataaccccatgccgcacttgggtatatttggcataatcattaatgcattcacttatttgcaaggcaagttcacgggtgggcgtcaaaatcaacgctttaatcccccggcacttggctgcctctttattcatttgcaaatgttgtataatgggaatagcaaacgaagcagttttacctgttcccgtttgcgcacagcctaatatatctctttttgctaatgcagccggaattgcctctccctgaatgggagtgggcactgcatatcctttttcttcaatagcttttaaaatcggttcggttatatttaattctttaaatgtcataattgttgtttttgctgtatcaaaacagctattaatttatattgtaaagggactgacaaactccatcatgggaatgaaaatcccgtaggttaagccagtttatgggttgccaagaaaaactcgcgctccagtgtactcattacttcttttacactactgattttttcagcgagaaaagcattgctaccggcaaaagcatagccttttttcatatttcctttggctgcattatataaagccttaataatgcaataagggctttttgtataatcacatgttttgatacaatggaatgagcaactcttaggcctctccagtccactattcacattgtgaataaattccccgtcaatagctcgtcctggcattcccacaggactttcaataataagaacatcttcggacttggagtgaatatgtacttccttgaacgtctcggacgcgtcacattcctgggtggtaacaaatatacttcccatttgtacccctgcagctcccagtcccataaaatgtgcaatatcttcacccgtcgaaatgccgccggcggcaatcaccggaatctgtttctgttctttatagctggatgcaatcattaccacttccggaatcaaagtttccaaagcataatgctgatcctgtaattgttcttttttgaatcctaaatgtccaccggctttaggcccctccaccacgattgcatcgggcagataattatagttcttctgccatttatcgcagatgattttggctgctcgtgaagaagatacaataggcactagcttggttgtactctccggagtcagatatgaaggcaggtcgagtggaagcccggcaccggaaaataccacatcaatcttttcctcgattgcggtgcgcaccatatccgcataattcgataaagcaaccatgacgtttacgccaataataccttttgttttcgcacgtgctttccggatttcctctttcagcccgttaatacatttttcaggataagtacctttccctttggggtataacaaacctaaacctgcgcatgatataacgcctactcctccttcgtttgctactgccgaagccaaacccgagagcgagatacctactcccattccaccttgtattacaggtgtttttatctcaatatttcctataaagaatgatttcatatgttttattttgctttagagcaattgaacaagataaacagtgtgagcacactttattcaagcgctcaagattggccctgtcattgactatttgccttgttgggtgtaatttattaaacctttactcctgacttcttcaagagtattgtgtattacaaaaaagtctaataaatctattttcagaatggaaagtgcaggagtagatattcctgatattgcacagaaaaagagccagaattagcagaacttaaatgtaatatgattttttgtcttcccctgtgtcaatcagaagattcctccgttgaatcatgaaacggaaataacttattaaatgaaagcagaagacagaatcttctgcttttattcggatattaatatcttctagagttattataaccaccacgaccaccaccgttagacggtctttcagtacgaggacgtgccacgcttactgaaataactttctggtcgtattcaactccattcagttcgtcaattgctttttgtccttctgtatcattcggcatttctacgaaagcaaatcctctggatctaccagtttctctgtcaaaaattactttagctgaagaaacttctccaaactctgcaaataaatttgttaagtcagcatcattagtgccatagcttaaacctgaaatgtaaatgttcatttaaaattttattaaaataaatactaatttggagtgaggaggataattaaagacaaggactgcttgctaataaaatattataaagaagaactatacgataatgattcgtaactcaaactcttggtacaaaggtaacacaataaatcagaataatacatttatacccgttctttttcggaagaaagacgataattatcatttattagcacacaattcatcctaaatcggcgagatacacaattttgcctatcattcttgatattctcttgtaatatatctacttttgccattacataaattatcaagtcccactttatggatgtcagaatagaaccaagttggaaacaacaattacaagaagaatttgacaaaccatacttcgaaaagttggttacattcgtcaaagatgaatacaaacgggcacacgtcctccctctcggacatcagatttttcatatattcaattcctgtcccttcgaaaaggtaaaagtagttatccttggacaagacccctatcccaatcccggacaatattatggagtctgtttttctgtgcctgatggagtagctatcccaggttcactaagcaacatcttcaaagaaatacaccaagatttgggaaagccaattccaacttctggtaatttggatcgttgggtagctcaaggtgtattcccgctaaactctgttcttactgtacgtgcgcacgaaaccggttctcatcgaaatatgggttgggaaatcttcacagacgcagttatcaggaaactaagtgaaaaacgggagaatttgatatttatgctttggggaagttatgcgaaagagaaacgatctttgatagataccaacaaacatctggtactaaccactgttcatccctctccccgctctgccgaatatggtttcttcggttgtaaacacttcagtaaagccaatgctttcttgcatagtaagggaatagaagaaattgattggtaaataaacgatttctcaaaacagattatcagtacccaaaaacattcgctatgaataaatcaaacaatattactcgggaagaaatgtgggcaaagcaatgcttgtcctccactgatattgattacgctgtgtgggaacgggataaatccatacttcaccaactttcaaaaatctgtcacaactgcacatttgttgtcgatgtctacaaatgcaattacacgtatgcatcctcgaatttcgttgatttactggggtatgacagtcacaagatagaaactttggaaaagcagggagattatttagaatcacgtattcatccggacgaccgtgcgcaactggcagcattacaagtcacgttaagccagttcatttacagtctgcccctcgaacagcgaaacgactattccaacatttacagtttccgtatactcaatgccaagcaacaatatatacgtgtcactagccgacatcaagttttggaacaagaccgtaacggcaaagcatggctcgtaataggcaatatggatatttcacccgaccaaaaacattccgaaacagtagactgcactgtcctaaatctaaagaactgggaattcttctctccttcctctttacttatgccttcttcgctcaacctcactaatcgggaaatagagatattacggcttattcaaaaagggttgttaagtaaagagattgcagacaaactatgtatcagtattcacactgtcaatattcaccggcagaacctgttacgcaaattaggtgtgcaaaattctatcgaagccattcgcttgggacaggaaaccggactactaagttaattaacccatacgccttttcctgaagctaccagtctgtctaaggcatccattccaccacacccaccaccgggtgcaatcttctccattcctcaaattccggataactacatacaccatcctgaatcacagcttgataatactccactcccataatcttttccgtatcaggcgtttcgtatttcaaattcaagatagccagtctcatttcatctgtcaataccgcagaaatgcgttcggccaccctttcaaagtagccatcataacgagagccttcttggatatgaatcatatccatttgccaaagttctccctccatatcctgataccatgcatgccactctatacacgcttcttccgtatgtaataaattcgtatattcaatcttctttacggacgtattttccgccaattcagccatcgcccgaaagctggcagacaaatccaaaggagaagtataaatatgaaaatcaatatcccgatgtttcatcaataatcctgtacgcaacgaacctaccagattcactttggcacccatcccctcccatatccgaacaatacgggtatcctctataatctcccaagctttctgctggttacgttttgccaattcaagaatattcatctttttccttattaagtaagtatgcaaaaataggaaaaaggatacatatatagctataaataactatttaatcccttaatgggttgagctaactttgtccgcaaattcaattcttcaccatacaactaaaaagagattatgatattcaatcaaacagagaaacaggaaaaagagtatttacagcaagtcataaccactatccatgatacgattaacactaccagtacttccgtcaaagagcatatagacaccctgcaggagtacaaggattatctatggtcgaacaaggatatcgatccgcacgaaatccgttccatgcgcgaaagcatattaaatcactttgcattaggtgaaaatgtaattgacaaacgcaggcgactaagcaaaatactggataccccctatttcggacgaatcgactttcaggaaaagaaagacaaaagccaagttagtccgatctatataggaatacatactttctatgacctcaatcaaaaaaagaatctgatttacgattggcgagctcctatttcaagcatgttctacgatcatgaattaggcgaggcgttctactcttcccccgcaggcaaaattaacggagcgatctcactcaaacgccaatatcgtattcgcaaaggaaaaatggagtacatgattgaaagttccataactgttcatgacgatattctgcaaaaagaactatgttccaatgccgacaataaaatgaaaaatatcgtcacgacaattcagagggaacagaatcagatcatccgtaatgaaaacgcttctgtacttattatacaaggtgttgccggttcaggaaaaacctctatcgccctccatcgtattgcctacctgctttatacacagaaaggacagatttcttccaaagacatattaatcatctcccccaataaagtatttgccgattacatttctaatgtacttccggaacttggcgaagagaccgttcccgaaaccagcatggagcaaattctgtcggatgtaattgacaacaaatataaacaccagaatttcttcgaacaagtgacggaactattagaaaacccgacacccgactttatcgaacggattcaatacaaagcctccttcgagtttatatcactacttgacaaattcatcctttacatggaaaacaactatttcaaagcaacagacgtaaaactcaccaaatacatcaccattcctgctgaatttattaacgaacagttcaaacgattccaccgctatcccatacgtcaacgatttgagactatgacagattacattctggaaatgatgcaactacaatataatctcacagttagcactccggagaaaaaccaactaaagaaagagataaaaaagatgttcgcgggcaataacgatctccaaatctataaagacttttttgagtggatcggaaaaccggagatgttcaagacacgcaaaaaccgcatactggaatatgcggatttagcccctttggcttatctgcatatcgcattaaatgggaacaacgcccaatcttacgtcaaacaccttctgatagacgaaatgcaagactattctcccatacaatacaaagtgattcaaaaactttatccgtgtcgaaaaacaattcttggagacacttcccaatccgtcaatccttatggttcttccactgccgatatgattcagaaagcatttgcaacaggagaaataatgaaactttgcaaaagctatcgttctacttttgagatcaccagttttgcacaaaaaattcaaccgaacaatgaattagaaccgattatgagacatggggaacaccccaagattcttccattcaaaaatacagaagaagagatccaaggtattgcggatttagtaaactccttcaggaactcccattatacctcattagggattatctgcaaaacagaatcccaagcaaaagaacttgttcaaaagctccagatatatgcaaacgacatctcacttttgtccaatcaaagttctgcttatgtaaaagggattatcatcacttccgcccatatggcgaaaggactggaatttgacgaagtaatcattccgcaaacagatgataagaactatcattccaatattgataaaagtatgctttatgtggcagccacaagggctatgcacaagctaactttgacttattctgtttcttcacccagttgtcgattcctgtaatagaatataacatcgaaaattaaaagaactacccgcaaaacaagagccgcttgaacaatctcaaacggctccgtaactcctttaacaacatggttatcgagctaatacaaccaccggtctatattccttttttctgcactgaactccactccaactttaaccaactcacgcccgtctacctgataaggtatcagatagcctttttcatcaatctgctgcaaagcctgttcggcagtaccattcagtttaaattcaaatacataaatatacttcggagttttcaccactgcatccgcccgtccgcgggcactacgaacctctgctccggtaaattgtcccatcaatttgaatactaagtaaaatacaacttgataatgtcgttcggtcttttcattcagttcataagggaaatctgcgaagaaagcttgtaagcgggtaagaaaagcgtcaacatcaccactctccaattcacgtacaaatttacctagataaaagccccgttcatcatctaccactgatgtgtaataaggaaccaaaaaatccataaatccatatcgtacttcatcattgggaaatttcagcaggtagtttccaaaacgcttgtcatacccctttatagtcaaatagccactctgataaatcaacggaatcggattattagcatctaccctatattccataaacgaagaagcattggcttctaccccatcaatcaacgtacgcaaatcatactcactctttttaagcagttcgactaaaaaagtaggagtaccggtttggaaccaataattactaaacttatacccgtcaaaaacgttaagcacactgaatggattgaatactccttccgcaaactcacaaaaatgataaccgtcatataaagccgtcatcttatttaatgtttcttcataagtcagttcatttgtttctgccaatcgattcagttcaggaataaaagtatcctccaattcttgtcgtgtaataccacaaatcgtggcatactgcggcttcatactgatatcattcagttgattcaaatcactgaacacactgacttgcgcaaacttagtcacaccggtaaggaaaacaaaacgaagataacggtcagaacttttcagtacaccatagaaggccttcaatgtcttacgatagtcatcaagcaaagcgtcatcacccaatgcctgcaacaaaggtttatcatattcatccaccaagactacgactccacgaccagactgttcacaggctcggcgaattacacccgcaaaacgtccggagagagtttcctcatcctcccctttgccatatttcagttcccattgcgtcaactgcctgctaagaatttcgactaaagcctggggagaatcatatttttccgcgtttaaatccaaatgaaataccggatatgtcttccattccttttccatatcagctatggccaacccttcaaataattctttcttaccttcgaaataagcttcaaaagtagaaagaagaagactcttgccgaaacggcgagggcggctcaagaaataaggtttacctgtgttagctattcgccacacaaaaacagtcttatctacatagagataattttcttcacgaatctctgcaaaagtctgtattccaataggaagtttacgtaatatcccgtccatgattttttctctattttgattattcaaagatacgcatttccatgggaatacacatacaaactccacaaaaaagtacacagtttcacagacagcactaccatgactccatttttcatcaaaactaactttgtaccagacaaacaacatctcacttcctcttcactttgcaaatccaacacacaagaaccagaaccagcaaaataattccgtaccaatacccacttccggttgtcctattagtagttttctcaactcccgttttatgaatctctgtcttagcgctcatatccgataagctcacagactgtgaattcacttcttgaagaagttgtttctcattaacgtttttcctatccaccacagtcttcaccaccatcccagccttcaatccaagcgtatccacaggaaatacaaacaacacctggtcaatatgctcctccaccacctccgaatccttttctaaagcaaccttatttttaactagacttttcccggagctactatttaaacttgaatcaaccctaacttcactctccctgtttatcacctctttcttactcctacatcccgacagcaatacaggcacaaccaaagccaccaacaacacaaacagtaactccctcccactcctcaaaaactccttcacatcaaaacagggacaagccttcacatattcataaggttcaatcactccgtcaccattcaaatccggtgaagtatcccgatgtcccaacacttggagaatattatattcccgctgcaaatccataataatctgataaagcacccgtttttgagcattcgtccgggtatctgccggacgcccgttcccatccaatccaccgatataacatatcgcgatactctgctcattccaacctttacaatgagcaccgggcaaagccacatcccgccccttttccaatttcccatccaaacggatcacatagtgatacccgataccgttgaacccacgttcccggtgccaacggtcaatatctgtggcagtaaaatcctgcccggctttcgtagccgaacaatgtactatgatagaatctatatttctcatgataattcattattagttcaaacgcaccagttaataatccgaaggtggcatacgcttcacacaccctctaatctcacacttcttcacttccgactccttctgtatcaactccacttcatgacatttatgtatccagtcaatcttctcttcctgctccttgcgaagttcaatataaagcccgtctatcttctcgtcacgttgagtcagccgttcttccagccagtccacctttttacggcgattttcttcttccatactgttcacggacgcttcctctttccgtgcatccgtcttacgacaagtgagatacctcactaaccatttcactgcttccaaaccacccatagcagtaataaaagcaaggattgtagttatttgcatatttatatttttacgtagttataaagaaagaatgaggccgaagccccattccatacaaaccagacagttctcaacggctcatgaatcaagcagccggatccggtgcttcaccattaccacccgaaccaccatccggatccggagtttcacccccatcatccgaaccgtcaccaacactacccaaatcattaatatgatccaaatccttgaacttcaatccatccgaacgggtagtcgtcccggtaaacagacgaatgtccgagttagcacgaaaacagatacgaagccctgaaatattagcgatcgtaaaatcttccgccttctccgtccctttgctttgggcagaaaggtaaaaatatcccagaccggcgatattcaccgaacggccacccagcaatgtctttctcaataacgtacggaaatctttcaatacactaatcgtttcaccctcgctgacaccggaagcagacgcaatctcctttgcaaactcatccaacgttgcactcgtatcatactgataagaaatcaccggatacactttctttcctgcttctttatttgtagggtcacacaggcgagacacccttctaaatctaatagccatactactttctttttttaataaatactgttttaattatcacttcgctaacgttaacgatgcaaagatgcagcatcttccacggagatgaaacgacaccaaatagcctcatcagaaaagtaccaaaaagcatttcagacatatacaaccgacatagaggaaccaaataaacgacaagataacgacaaaaagcaaggaaaaagcgacaaaaccgatagcctggggagaataataaacaaacaaatatattcaaactaataaataccatactaaaaagcatggaaagttttaggcgctcaaggctgtcaatagccagataccgcatattgaaagagagcaaactgcaattatgccagtatatcgaaagcaatgaaaaccaagaattactgaaattgttgcgagatgattcgggcaagattgtctgatatatgttaatatttcatggcaaataagcatttcccagtacaaacgcactacaatcacaaataaatgtagtagatttgtcctaaaataaagagtacaggcatgaaaagcaagagatataataacagttttacctcctctagtatggtaaaggaagaaggtcggacagcctattacaagctgctggacagtgtgcgtgacggagacgcggtacgcatcaaacggggcgtatatgccacagccgagcagttggcggacacgatgatagatgtggaagccatcgttccaggcggagtgctatgccttttctccgcatggaatgtgcatgggctcaccacctcattgcctcaggcataccatgtggcggtaaaaagaggtcgcaaaatcacgcttccaacatttcccaagatagagctccatcatatcacagacacgatgtttgacataggtgtcgaggaactggttgtaagcggttaccacatacatatatataataaagagcgatgcgtgtgcgatgcggtgaagtaccgcaacaagataggcatggatgtttgttccgaagtggtgaataactacatttcccagccagacagaaatctatccctgctgatggattatgccgacaaactaagagtaagacgaatccttgaacagtatattgcaataaaactatgagtgaaatcaaaaatcctggaaagtccatccgggcaaagctgctcaatgtagccaagcagaaggatgtgttctaccagaccattctgaccagatattttcaggaacgcctattgtaccgtatctcacagactcattaccgtgagaacttctacctgaaaggtggagcactgatgtatgcatacgaacgctttgctgcacgtccgacattggatattgattttcttggcacgcatatcagcaatgatggcgaacgcatcgccgaggcgttccgtgaaatatgcgctgtagagtgtgaggaagacggagtaaggtttgctgccgacaagcttgcagcacagaacatcaccgagttcaaagactaccacggtatccgtctaagtattccggcgacaatggacaccattgcccaagtgctgacaatggacattggttttggagatgtggtaacaccacatcctgtatcattagattacccattgttattggaagaactgccagaagcaaacattcttgcctattccactgaaaccgtaattgcggagaagatgcacgccatcatagacttagctgaccaaagcagccggatgaaagactattatgacatctaccacctgctcacatcattcaaatatgacaataccatattacaggatgctatcaaccgcactttcgagaatcgtcatactctttataatgcagatacgatgttcttcaggaaagactttcccaaccatacgcagatgcagttacgatggtcaacatttctaaaaaaggcaactatcaaaaatagcctttcattctccgaggtggcacattggctgcaagaggctttaatgccatattgggaagcctatggacgtatgtaatacttccgaccattaatacattatacaaaaagagtgcaccttcttccccaccgggaaaaagatgcaccacacaaacaaaacaaacaatagagcgaccttcacaggcagcgtagaacccatgattccatttttcctatgctactattataaaaagaaaaatggcaggggcacggattcccttggggaaatgaggcgcttcacagcgacataaaggatataggccattaaactcatttattatactatatggggaaaacctacatctttttctattctcacaaaaacatgaaatgaaacaattaatttccttttattgttttccagactggcactgctaccaccgcaccgacaatcggagccacaataaacaaccaaagctggctgatagcctccactccggcaaacaatgccggaccaatgctacgggcaggattaaccgatgtccccgtaacgggaatacatacaatatgcaccagtaccagagtcaatccgatagccaacccggcaaaatgaggactactattatcccggtcggtagtgcccaatacagtcagcacgaagatgaacgtaaacaccgcctcggccacaaatgcagccagcagatacggttcttcaaaaccgttggctcccgtaccttctatccccattgtgccggtaatcaaccacagcaatgcagagccaagtattccgcccgtcacttgcgctacgatatacacaccggcttccattaccgacagtccgccattcagccaaacgccgatggtgatggccggattgatatgacagcccgaaacaggaccgattgtgtacgccattgccaccaccgacaaaccgaacgcgaaagcaatcgtcaacaccgcggctaccgatgtcgcgccgccattcaatacagcagcgccgcatcccattaagacaagcaccatagtgcccaccatttcagctataaatttcgttttcataatctactttttctactcgtataagatatactattctctctaatcatcctcccattccgaaggcggcaacgacttcttcccataccatttcatccaagcacgagatttccgctttctcaaataaagcgcatcgctacaatgctccaacgcttcccagtcaaatgaagaatggtgtccgaaccacctctccagccagtaaagcagatgataactcatgaacgcaagcaacatccaccaccacgaaagccagacggatagcaccaatgcaggcaataatgccaagaagaaacattccgtatactgccgcgcatgaatctgaagttccatctcctcccacccttccaaatatttgaaccgggtgaaacaacaaccgaaaatcataaaataatgccttttcttcctgttcagaaaagttttcgccaacagactattatatattatcatatcctcctcttcattcaaaaaagcaacattgcaaaagaccatccaactaccggccaacaagcccaccttgtaacgacaaagcgctttcagtcccgacatagaagaaaacgagacagccccgcaatgttgcctgaaataccttgaaatgaaataaaactattattcgacgattacgacgcggttcaattcaggttcactaaaacggttgttcgtatcgccctccgctttcttcacgagacgttcaggggaaattttatacttttcgactaataaattgtacacatactccatacgttgttcactcaaacgttggttcagttccttgctgcccgtagcgctgtccgccgaaccaatcagcgtgaaagtcttgttcttatccgccttgatagcgttgttcacataaaactcaagattggcaagttccttcttatccaaagtagccttgccgatagggaagaacagggctaccggcgaagcagtcactttcgattcattcaccacttccggtttccgatttctggcagcttccagttcggcggcaagacgctgtgcttcggtgctcaaatcatgatttttggcacgaagcgcgttgatacgttcattataagatgaataatctgccggagccactttctcgacacgattgaaacgggtcttgcccaacttcacgcttagccccagtgtcacagaactcattccttcacctttgctgccacttacagttccgtcaaaagactctttcacaagcatctgtcgtccttccagagtcaggtccagacgcttgcccaggcggaacgtattcaaaataccaatgttggcggcaatttcattatcatgcgtactgtttccccacgaacgtgcccagccgaaaccgacaaacggaatcacattccacacacgtttctcattgaatccgaggaaaccgttcgaccagttccacataaagtccgcatggagattggaaacattaaactcttccttataataaccgcgatgcgcccctttggcatacatcccgcttgcatccgtcagccccttggctttcagacccgaatattgtaggcggactccgtaagaaggagtaatccacttgcccaacgacacatccagtgcaggagcaatacggttgcccaccgatgtcttgttatcaagttcaccttcatagatattgattccaccgcctacaccgatataccagttactccagaaactattcgtttcatacgggtcacggagaatatttccgtccgtatcacgattttccttttgctgtgccatggcacagactgatgataataccaatgcaactgtaataattttctttttcatgtttcaatttttatgttcaacatttagtttaacctgtttctttactctaatttcattttacttccgggacggaatttcacttgtcgtttggctggaatcagcattgagccgcctgtggcaggattatgcccgttgcgcgctttccgttcttgaatgacaaaactgccgaagccgaccaaggtgacactctctcctttatgcattgtttccgcaatggtttccatgattgcatctacagcattcgtagcttcgttaaagctcaactgacctttaagggctacttctttgattagttctgatttgttcataggtttgtatttaaaaatgaattatatatgtttattcgtcacggatacagcggacaggtgctgccgtagaacgatctaaccagtaattattacccccaccgaagccacagccaacatcaccattttttaaatcaaatccaaatgacattattacattcataccactgccatcattatatctcattgtcccacaaagatgagcactataaaaagggccatttactacccctttatcataagttcttccatggcgaagcgaagtagaaataaaatagactttccgtgtactattttcactaccacaatagaaatataccccatacttagtaaataaaggagtataaaaatctcccttctccatatgtcccaaaaattcggttccgcttttgccaataggggaatctattattggatattttaaaaatgcaccatatacatccggcggagatactttgtaaccaacaggacatggatcataaagggtcttcattgtctctacattaaccattttatattgcgaataagggttatttccccataaatattgatttccagtcaaatcattattaccggattcagaagtataatacaaccaatcatgaacactataggcatcatcacttatgataaatacggcaggatgatttatcgcatactcaattgttcctatactttcatttttttcctcctctttgtgctttagtttacttccacgtacattatgcataaaatcgtccgtactttcaaaggaagctgaaatacaaaaaggatctttacgcccccattggtaacccaaaccacgtgttgttaactcatcaggagtattagttgttgctcctaaatctcgatccattattctataattcttcccactataagtttctccattggttggtaggcctaattctattatagtggggtgctctgtacaccaaacatgccaactccatagtactgtagcatcctccgcatttggatcttgtttatcataaactgcaataaccccatttcccgtaccactactcaagaattcaactcgattagtagtagaattaaatgcaacttgtgatataagattttgcttgtcctgccaaattagttttgcagaataaggaactatctcaacatttttagaaactgatatatcttcacctgaagcatttttaaaatgatattgttctatatcttcacctaattcttcccgccatgcagctctgcctctcgtttccgccactataccatcaaccccgtttcctatcaccgtagcgtcaaacgaataaacaccataagtcaccggagtaataaagcagtttgccggaccgtcttcatccacagcaatcgcttctgtgtgagatatgatactgaaagggatatacttcactatgttacctacggatatttccaaaaatccttcctttagtgaagagttttcgggtacagtgcaataaatccaatacacatcgctatcttgcggaaggttcacttcattcaccgaaagtcctcctgttcccttcacctgtaccaaattattattatctatgctataaaacaggcataagtcagatgagggtaccaaagttttcttatccgaatttaaaacgcgaacattacgagtggtaacaccactaaaatcgacattacccgtatcatcagcctgcaattcaaattttaccattgttaccggatctgtgatgccattctctatcaacttaaggtcttccctatccgtttttaccaagtactggccgttagaagcatatccccgcgaccaattatccgaaaccgtcaccgtatactcgatattacttcccggattttgaatggcttccagttccgtatcatatcccttattctttagctcggcaatagtaaagcgataagaatgattacgtattatatccagatactgcccggtttccttatccaggaaatccaaacgataatactctttattcgaaccgtccggattccggactacaagaagcaacattgcacgatctttggagaatgttttcttatcaaccttatttcctaaagcgtaaatggagtgttcatattccaaaggatagtaacttgtcaccagtcctttcgttacatccaaaggaactgtagcggaaagtaaatcatgtttttccgaaacgccgctttcgttaatactgccctgatagatttcccccttatactcgctatctaatgtaaaatccgaataattaagatttctccattcccaatagacttgtttaccggaaaacaaatccgcctttgcatcaaccgtaacttttgccaaacaacgggtcaacagacaaatgttagaggtagcgttctcattccattccatccaaccgtacatcggaatagtccgcccttcactttgcagagcggaaaagcccttcatcattccttgactagtataattcctcaactgctcttcactagccattttatttataagaaaatcacctgctcctgatgcagaagaacgattagtcaggttacaaactacataaattcgttctttgtcagcgggaatgtattctttcaatgtcacagtcggcgatgcagtgtcattaccgaacaaaaaagacaaatcagctttaccctcctgataatatacaggggatgaggcgtgagaatcattatatacaaacacctgtatgccactaatcttacattccgattcattcgccacgctacgtacctgtaccaattccgcatccgggatagacaagctgatgacatttttttgagaggaatcaatcatttccatttcagtgtcatcgttacaaccacctaacaacaacatattaaaagcgaagaaaaccaacagacatatcccgaacaagtattgttgtattgttattttcatttcattcatactttttagatttctaatgaattattcctttacacagcgtatcgaagcaggcactgaagtaaccaccggattatatatattatattcaaagtccatagcagtatatggatgaaagttaaacatgagcccactatgttctttgtcagcaggatgaggtgaagaacaccagtaaactccccattttcctaactttataccatcaccattaggtctataagtctccggcaaataaattagcttcgtttcatcaatccctgcattatcataataaaaggttgatccattcgcaaaataactttttatgaaatacatatccccaagtgacgctccggctggggggaatatggcgatctcacctttactcaagattttaaaaacgtcatgcggcgcaactttataaccatatggacaagggtcatacaacgattttaatgtttctttagggaaagcatcctgttccccgtccggatttccccacagatatttcagttctgttgttttcgtacaccaagattccccccccaatcctctccttggactatacaaggaactcggagtacttatagcttgaccggcagtcactcgttcatcggaatatttatatacgccctgaccacttcttacgtcatataaaatggtacgtatgccatcataagtcaatgaacccgaaaacgggtctttacgtccccattgataatgcagcccttgaacagtgcctaaatacgctttagtagcagtagcaccaagattacggtccatcactttatagttattgcccgtgtatatcgaagtgacgaattccagtatctttggggtagccgtacaccaaaggtgccaactccacaacactttcgcatcctccgcattaggattagtcttatcataaacagctatcactgcatttccccggcttcgtcccattttcacctgaaccctgccattgactaaagcaacttgttccaccagttcatccgtgtcctgccaaagcaatttggccgataaaggatgaatattggcaccaccggcttttgtcaagatattgccacttgcgtcttcaaacttcccttcgtcaataataccgtccactccgtttcccattatggtagcagtgaaagaataagaacctgcacctctatctgctatataactattggcagtcccttccgtgtctaacggagtaaaagtatccaatgaactgacaggaatatattccacatgcacattgtcggaagaaatttctataaaaccaccttcataattggcgggaacactaccggtggtacaatagaaattcattacttgtgcggcagtgaggtcataaatgccactgttatccgccagtttatccgtttccgttattccattgcaatataactgtaaatctgttgttgatattaaatctgtcttattaggcttcaaagctctgatttgtaagcgtcccggagcatgacagtccactttcagcagtttcaccgggtcgacaatatctttaatcaaagttatttttgtcctgtctatatcaaagtcaacgcctcctacaatatcacccgtaacccctacatcttcccaatcaagcatatctgtgaatactttcacttcatcaagacttagcacttgtacgtccaccgaataaatatggttacgtttcatccgataagaatcttccgcttttacaggtatcgtacgttctatcacccgactagctattccgtccgtcacaggaatagtcagtttcaatgatgtcacgttaatagccgggtcatactcctcttcctgttccagataattttcataaacaaataatggataaaaagtaatagcttcaccgttaatctccacttgttcatgagcaagtatatcatataagctcacttccggataatccggataatttaatgaagatgccggcagattttcaacaacagcctcattggcatgagaagagaacggagcatacttacgaatcctatctgcagcatgaatcacctgtatttttacatctcctatcatcaattcctgcggaacagtaaatgaggttgtccgaacagtagtccgtagtttggcgactccccgtaacaaatgcacggaagctttgaaatttctatttatgccgtcctcaatcactcccgtacctgacatgtagaaaggggaaaccggctgtccggagattattgcgggagtgtcttcattggcacgtacccgcaaggtgtaacccgcctccaatgtccctatatcaaacagtgtagaaaccgcatagacactatcaacatccgtaggggtcaatgtcaatgctccgtctgctgtggaacgggatgctatcacagtcccgctattcataacatccatgaaaagccgctcaaccttgttctcaccggccatcccattctctatgcttcggacaaccggttgttttcccccgggtattaccaaacggagttccatccgttccttgccgtcgggtatcatgttgtccacattgccaatatcacaatttctaatatcttccacacatgaagataataaaagcagtataaaagcaaacttatatcctattaccattttattcgtcatagatgtaacctccattttactctttcacacaacgtacagcacccgcagtcgcttcatcccaaataacactttcacccttaccgtgaatacgctctgtccaatacagacacatgttccgacacttcatatctcgaccaaggtttcctgcacgaagcataacaacctgccccaaggatcctgacagctccccagtccccccgtgtctatatcctgctgcaggataataaatatcactcctaccagcaaatccgccgccatatctttcttcatagaaaacctgctccagaccagaatcttcccatggagtagatatgccatctttgccggcaggaactctccaaccatccggacaagggtcaaaaatcgttttctttccagatttcgtattccacaaataaggatacttggtagagtacgaaaaccagaggagttgtgagggtgctgtataatatgccatcggattattcactgaacccggtatattattaatatccgacgtagatacactaattttagtaataggcttaatttcgccagtgacgctatacaattcttcttcaggctccgtataaagccaacccttagctggtggaaacggatctttccgcccccattgatatagaaatcccttagactcaattcctccctgcttctcatcatagttattatatgttgcccccaaattacgatccatccaagtataaccattaaactcttgttgtccctcttctaaattcggatcatagtctgtgcaccagatatgccagctccagtaaatctttccattcactttcatcgctatcactgcattgccagactgattttccgtttccacactgatataagctttatcacgtttttccgcattcataaccttcactccggaagccggcactacccctattctatctacccaaagtacttcggccgtaacctcaccatcgggaataggtgtacgttcaaattcatccatttgtgcccatgccttgtacaccccgtcagtgggaatgtgcacccttccgccgggcgataccacataacagtttgttatacgtatatcgttcacttcttctacttggggttctaacgctatccacggacacactgtcaagtttatatccaaatagactgttttttgcatgaaccggcacagtaattgataaacatgattacgctccagtttttccaaaggcgctttgccggaattatccgaatccacacccaactctatcatatcgtaatcatcaaaaccgatattcaatttattgtttttacactccatttccggaatataaaacgagtaagccagcacgcccttgtcttcaggagaagtttcttcagggatctcactgactttctttctcgataacagattgagaacggaagacgcataacttcctgttctttttggggatacgaatcctgtcttggaaactccagtcacaaccaatgtggtaggcatcaagacctcctcccagttctttgcctccttccgcatataaacatccacacgcgccacagcacggtctacacgcatgttgactgtctgcgtcgttccctccgccgcatccactcctgccagttctccatacatgggaagacagtagtctttagtgtattccaccacattggttcttgtggataagtagtccgccatttgatactgtacgtccaccaagtcattgggatgatccacagactccaatatagcgcgggtatcaaagtcaacaggttcgtttacaatggcatacaatgttttcccggtggcggctttcaccgtaaaaaccggagtagtataagtcccgtcgatagcggaaagcccttgccagtaatacatcttatccagtgacgtgccgtcaaaaacatagatgcgtagccggctgatgcgggtttcattcgcgttcaacactaccgggtcactcgtgacacgtgtgctgatattcatgctcatccgtacttctccgggatttagcggatcgactgtctgtccactttccgtacaggaaaacaagaacaacagcaaccacgcccaccatatacagcctttatatctcatattcatcaatctttgtttatttatcagagatcttcgcctttcagccagatagtccagccgttaatcataatcttagtagaaaggaaattcaataattccgggttatagaaaaagacaatcgcatactcactctgacggtcgaggtattcctgtgccgggatattgtgcccttccattttagtaagcagcaggtaaggtatcaggtcaaccttcatcagttccttactatccgacttgcgtgtaagcgtcaggtatacctttttatgttcgagcaggcgcatggtattcatttctgccacaatgcccacatcttccactttttccagatgatacggctggtaactaatcatgtcgtcatccagcaagtcattattccagtcgtaatatccgttgtccgcccggatttcgaacaggcaatcattcatatccagttcttctcccggaccagacttttgcagaataaagcggaatttattggtattctttatcaggcggaccgtttccgtctgttcctgtttgccggtaaagtttacggtctgtatcccgccataccagagaggctccaaaactttattatgtatcaaggattcttcccgtttcatttttaccgtcaaatctttcagtgtcgattttccggcaaccagttccggcatttcaaaggcatcgctcattcccgcccacgtagctatccggtattccccaattggcagttgtaactgcatacggtagctgccactgcccagagttttcccttgttcactcttcttcatgataaacgtgccatccttgtcgaatacaaacacatcgacacgattcacttgagccgcaaaagcatcggtgaactccatgttatagtcataccggaaactaacatataactgacattccggtagtgtctcatctatggatgtgcaagaaaagagtacaagcagtaataacaggcaacttccataacttatctgccggacggcaccttttgtattcattatctttctcataatcatctatggttctattatttttctaatttcatatatggtgtggaaaagcgcctttgtgcttttctcggaataatctgttttagtggacaagtcttaaaacttgtctgtatggcaagacctgtttttatcaagtttttcatatcaaggtcttgattcacggaaataagcctccgccggctgaataaaaaatgaaaagaaagaaaaaagaaggcgtcacaagacaaactgcgccgtatcataacgccttcttataattttaattgttattttagcccgatatatcagtcattacaaatccactccctgactccaagtagtccatgggtcaactgtaatatttacagagagatatgcttcttggtcatcatcgtcttcacccggatttgtaggtttagtaggatctgtcttgtcaggaatccagggagtacccggttgcttcacgctgttgatagtcaatgtgtaccagttgttgcgcacgacaccgtatttaccatgtgccatccatgcagtgatttcgtcatcatgacgaatcaggatgttatagtagcatacgcctttctggaagtattccacacctactgtttcgccggctgttgcatcaggtttggagtattcgccaccactcttaaggccgtccagttcagcaatagtaatagaggcaaaatcagcaccgacagtcttttcttgtgcagtggcggctttggcaatacgtgcatagaactggtcacaaagatcgattatctgttgttgtgccgcatccggtgtaccagcagccgcagcattatatactgcctgcaaatcagccaatgtcttgtaagtgacacccaaaaggcggaaccagctttcgcccacagtaaatgaattaggagtgtaaaccgcacttgctacggcagccgtagtctgcgcctgggtttgcgcgtcatgttccattgtgttctcaagacagtatttgctgtctgtcatgggagagaagtcagcaggcaaaacacctttatcagatactttcaggtagttgaactgcgacacattgaatcctgccttttcatagttcgggtcaattctataatctgcatcagcagaacctccggcaggcattactatttcagaatatgggaacatgctcttgttggttacattcaatgcccagttaccgaatgtacaggtcactccggcaggaactatgacgccggccggatttgttcctaaagaaactttagcaactatacggtctacaaaaatctttgaacggtcagtttcggctgcggctatcgcgtcagcaacgtcagaaatacccgcgtcgccaaccttttttactttagcttccgccaatgctccgttagtagggtttgtattgtcgccggcattaatcatcataaagttgtcctttgacgctccaatcacttcatcaagtgtctgctccacagcaccattgatgacagaccagggagcggaagctacacaggcagccttgaacttgccgctcggattgaccactgccagtactttggcggtagcggaaggtactttgaatgcctttccggcatatcctgacttatcagcaccacctacattcaagatatagtcggttgtacccaatgtctttgtttccaagcaaacattcgacgcatcaaacaatgcgagaagcacttcgtttactttctgttcttccgcactgccatggtcttttcccggagcacgtgttcccgtacttttaggcattgtcacagatacggacatataagcctccctgccgtctaccggcaactggtcttgtccgccggttgccatctcttcatcattactacatgctgccatcgccagtccgacaaacagcgttaaaaaagatttgtccaatttcattgttttaaaatttaatgaatactaaaatgttaattactaagtataagtttcagattatattattcagtttttataccttccaaacgtttcaggtacatccgcatcgcatcataatctcccatttcccatgctacgatagcggcgttgttgttagccatcctgtcactcggaaagcggtcggcaatcatccggataatcctgttgtattcgtccgaacctttgccgtagctgactgcgacctgatacatttcgttatggttcattttgtcggggcgcgtcttgattatttcccgcccttgctccacggagaacggaaccaccgtatagctgactgtatattccaccaggcgcagcttcggatatacctcttgcagtaaggcattatagatttttccgccgtcgatagcttttatcttcgcgtcgcgtgcatccggttcgggagtctgcccgataatatcaagcactttctgcatataggaaggacagtattcgcgcaaccatgcagctagtccctcccaattctccggcaccgaacggcattctatcatactgtcgtccagcttataggcatgtttcaggttttgtaccaacgctttcgcacgttgttcggaaaggcgggcattggcgtcataattgccttccggcgatgagtagcccactatcttaatccgggcaatacgatagttatcatcttcacggatagaatcaatggacgaatggattttagccagttcggtaggattattcatataatcggcaagcaatgccgactggttcactttaaaattaagatatgcgctgcgggtgaaagaacgacgtttctcctctgcctgtgccaccattatttccagattcgggcgttccactacctctttgaataaaggaagttccgcaacgggggcattacccagtgcttctccgcaacctgcgcatccctgtaattcacggaatatctcgacacgtgctccggacatccactcctgtgccggaactgtttcgttatattctaacaacatatcccgtttcctgttaaaacgaatcatttcctgtccctctcccgcagccggttctttgccatacagactttctttccgcttgttcatgcgataacggtttctgcctgcaatgcagactgaaggcagggcgagcgtatcgttttccgaccggctgattatcaagggagtgattatcatttgtcggcgtgaaggaagccgcagtatgctgcaatccatattaaatgagacttccactttgtcatcgcttattttccgggcaacggcttgtccgatatttatctcctgggcatgggcggaaactgcgcctagcagtcccaaggtcacgtatatacagattcttttcatcattaacctattttataatgtatatgatactcactgcagcttttgtcgggccgaagtagtttttcttctcatttttctgaatggttccacatgtggcacaaggatatttggagtgatccaaccgggcatatccgactccaagtacagcctccatgctccagcggttaccgagcagccactgataaccgtaggatattccgccgccccacaaatgcccctgatagcggtgacgttccatattatcacttagaaatgacattccgcccacattgtatttggcgtagtgtccgtgcagacccagaaaatgaccgttgaatttctcacaaagccagtagcgaagttccggctgtacgccccagtggcgcaggcgcgtttcatcatcaaacttccagggattataatttccggataaatcgagagaccatttcttgcccaaacctatttccagccccaagttcattgtagtagtagcgtcataaagcaaattagtctttactgcaaccttttgggcgtaagagttgcccgtattacaaagtagtattcccaagactccgattaaacatagatatttcttcatgtcgtcttattatttattattgcttttgtttcatctctattccgtaatagagatgaaacaaaagaatacaaacaataaaaacctaattaccaatgatttatatcacataaagcacccatataacgtttcagtatcatgataaaatgaatcatagcaaacaaaacagaaaataatattctgatatataattcattaaaaatacagatactgaaacaattgtgaaacaaacagataggtaacagaccaaacaatcaaaacagttattgccatggaaacaaaacttatgaaaagcgaattgctgtacatcgaagaacacctgtcatgccaaaactacatgacaacgattgaaaccggattcaagtatcttgagttcaataagaacacagaatttgaggaagacactacaagtaagaattatcttctattcttcctgaaaggtgatttcaccataacttgcaaccagttccacaacagactgtttcatgccggagagatgatactcatcccacgttcttcccggctgaagggaattggagaaaacggttcaagcctgctctccatgtttttcgatatgcccgaaggaaactgtgacaagctcatattgcaatctttatcagacctttgcgacaacattgaatatgacttctcaccgattagaatacactacccgctgacaccattcctcgaagtgctgacccactgtatcaagaacggaatgaattgcgctcacctgcacaccctgatgcaacgggaatttttctttctcctgcgcggattttatgaaaagcaggagattgcagtattatttcatcctatcatcggaaaagaaatgaacttcaaggattttgtcatgcgcaaccataccaaagtggataatatagaacagctcatctcactatcgaacctgggaagaagccgcttcttttccaaattcaacgaggtgttcggaatgactgccaaacaatggatgctgaaacaaaagaaccaaaggatactcgaaaaaatgaccgaaccgggagtatgtataaaagacgccgttgaagaattgggatttgattcgcagagtaacttcaaccgtcactgcaaactatatttcggatgtaccgccaaacagttaatggaacgctgccagaccgaaaacaaccctatttatgaggataaccacgcaacatgtacaaaatgaataaaaaaatgtactttatgacaattcatattataaaaaaataagcttactttgcagcgtgaaaatagttcaaaacaacaaagagattttaatataatctctattacggaatagattacaatactgcaaagataaataaaaatattatatcttctaattttcaacagattaaattacaaattttcatttcacttggataaatttgtaactatgctgttcacctgattgagcatggacacatcgaaatctttcaaatagacacgtgtcatttcttccgaagtgtgccctagtccggcactaatcacagaaattggtgctccatagtcacgggcaagggtagcccaggtatggcgggcggtgtacgtcgtcaacgcaacttttatatcagctgcaacagcgattttcttcaaatggcggttgatacgccctaacgccaggcggtattgtttgtatcccgaagcatattcaccgctgatgatcggaaagagatactcattctccgtcttatatttatcgatcaagccctgcatctggggagtcaccgctatgcgaatcaactgtttcgacttatgacgggaataagtcagcacaccattgcaaatatcgctcttcctcaaaaggacaatatcaacaaaagccattccctgcgcataaaagctgaacagatacaaatcgcgggcaaactccagttcaggttcattctccaaattcaagtccgccagattctgcatatccgtccgtgacaaagcacgtttcatcgttttcgccgggcgggtctgtgccttcgcaaacggatattcgccacgaggatgataaccgtccgttaccgcctggttatacaaagagcgcaaattgcgcagataatagcttaccgtatttccagaagagccgttactatacaggaaatcctcgtatctcctaacgaacgccaaatcaacctctgacatccgcacatcagggcgacctataaattttgccaacgacgaacgggtgctcttgtaggccgcagccatccccactttcttcagttcctgcttacgctcaatctgcgcattgatatatcgcaataaataaaactgtggttttcctgtaccaaaagcattttgagccagaatatcctccactgtaaattcttccctattcttatggattacgcaagcgaattttgataatttctcgaaaaaaaagcatccgtcctaattacagcgaacataatcgtaactaatttcgctctaactgcattcagaaccgacatcttattttttccctcttcgacctttctgtcataatatttcttcaatggactatttttcacttgtgaaacagatagtgccgccatatgtagcaaatgcttgatgctcttgtcagccctattagatactctatttttagaacgttggctacttcctgacacatagacgaacggaacaactcctgcatgacagcaaaacttcctgggatcagtaaaagaagtgaaagcatctgtttccatgatcatcttcagtgcaacacgttccccaactccatccacagacatgagtaaatccatttgatgagcaatgacaggtgcctgatttataagttcttttatttcaaggtctatttgtgctatgtaatccgtaaatgtattgataatcccttcaactctattgcatttagcaatatatattgagtgttccatatagtctacctgatcttttagctgggattgatatttagccctatctgcaacaagcatactgcgttctgttgataagtttttgagtttttgtattataagctctgatgcggtatacggttgtaggcaatcattatatctttctgcatacattgctattcggcaggcatctattttatcatttttgccacgaggtattccatgacaatattttattttagctgcatcttccaaacataagtagactcctatactttttgttgcacagaccaaaggataggtatattgccctgtatgttccgcacagacaaccaaactgtcctcagagaggaaaaatttctcaaacgttcttgttaaccaagatttaatagaggatagatcattaggaataacatcataaaggatgtccttaccgttactccttaaacataaatccaattttttcttactcacatcaactcctaaataaaaaactttcatacttttgtttttgaacattaaacaaaaaagaaaggacctgaacttgacctaataaccttaaacaggtttactgaaattcttatatgggtttgagttcaaggaaggagcaaaaggaccgaatagggacttagacttgacttctattgccgctgatggttttccttttgctttcctttcaatatcaattcaaagataaatattttgatgctgcaaatctaaggttgtccgctcaagctgcctgatccgtgtatcaatccgattccgcatcttccgtagctcgcggttcattttcacgacctctgtagccgtaaaagtagaacttacgccattcataatcttcccttccagctcgtcaaacacttcctctttcacccggtagcctgtatacagtaacttttttctccgattgtggatcacctgaaatactaaaggataactgccattattcaatatcctgctcttattcagcataagtttcactgatgttatcatatcttgctttttttgtttgagacgtaaaagtacgaagttcaccttacttatcagaactatttttccgcctgttacgcaagaaacaagaaatggaataaaaagtttttccactttaagaatagttatctgataaatatagttaaaatacacgttctagcaattagtatatttttattacatatttccaatatacatacgcataaattagatatgtataccatttatgatatttcattacataatataaagattaccgctattcttccttttgaaaaattagaatattaggcatagctttgcactatggattttagggagccgtccgttcctttaaaaggaagaggtcattcctcggtgtgcaacgggtcgttccttttaaaggaacggtccgttggttttaaaggaaaaaccggcatttgtaaccatttgaatttcaacttcttactgaattagaattccgtccccgtaacccatgggattttttccaacaaacacgacggaatctgccgcacgaagcggcaatcagtatacaacaaatttcaacaattcaaaattcaaatcccatggttacagtcacgtttgccatcaagccatatctggcgaggtatatgtatgtccggtacggacaaagtttagaacttctatcgcataacaatccaccgtcaaggctccccattccaatccacctctcccacctcactcccatttatcacttcctgcatcaattatccgttcctcatccgcaaggcgtctcttggaaagagacaggaaatatcacttttgttcttcctagcccaaggcagggcaagaacccggaaatctacaattatttcagtcaggacagtatctttattattgaaaaggaaattgaggtggaaatgaaagcagagctttattcattcctgttggagaataagttcaaaaatggggtgatgtatataaagtcgatgcatgagtttgtggtaaagtatgatatggcggagtcggtggaagaggaaagtttgatgagagggtttcagaggtggagaaagaaaatgaaaaaatgacgctacgaagaaatcataccttatttaatagcgatatcatttaacaacgacaggttatacaacgttaaaaaaaaaaatatcagaaacaaccggctcttattatctaagaatttactacttttatacctgcataagaacaatggtagtattatggaaaaagaacgatatttcattcattttaaaggtggactatataaaatgctgggtattgcccagcatagtgagacacttgaggagatggttgtttatcaggcattatatggtaagcatgaaatatgggtccgtcctaaaactatgttttttgataagatagtacgaaatggtattaaaatagatcgttttaaagaaataacagaaaaagaaatatatgcctattacccagaaagaaaagaaatatctgaagaataaacacaaaggtgggaaaaataatagcaaaggagctatctatgaaagctactacgcaacttaccaaattgtttcatttatgaatcaatatattacccaattaagtaacgtccacctaacgacacaactacatgacgcctttgttgatgatctttttattgaagaacctaatgctcataaaacctatcatcaactaaaagatgtgaaagatttaacatgggaaactagtaagttaaaatatgattttaaaagacaaacagagatttcgtcagaaagaaacgagaagttcaaactgaaactaatttattcaaatcctaatagttcagtatctactgttccttctgaaattagttcgtatacaacatcagaatattttccttcttgttctagtatcaaccaattaattctatcacatcctatatttaaggaagcaatccagcaaataacagtatcacaacaagcagaaaatgatgaattatttggaattgcagctgctattttaggagcatggaattctgttgaacaagaaagtgtatctctacaacagattttggatattgtacattcaataggtaaagggtatgtgaacataaaaacatatccaaacgttgaaatatcagaagaatgcaagattctcctaaatcagtttggaatcagttttcttgaaaaagggactactgtatactggaactatcacaacatgaatggagaggttgtctggacaagcgaaattgaacaaaagttacagaaagccaatcctgcaaatatttgggatttaatggaattattaagttgaaatagaatgaatatgagaacttataccaatataacatacgaaaagaacagagatattattcaattgatgcatatcttatccaatcccaatacctcaattgaaatttatcgtaataccttctacaaactaggcaaagcactaggagctttgctggatgaaaagaaacatagcaggtatggaaataccatgctggcatgtgcatcagaagatgctgactggttggcacaaggtgttttaagctctatttcacagaaaaatgttgcattagccgttttttggaatcagagaatcactttggatgaaacaacaaaattggaatatagtccgattgtaaaatcttatatagagccgattgaagagtgtcaaactctaattgttgtaaaatcaattataagcagttcctgtgtggtaaaaacacaactaaccagattggtggaaaaaatgaacccgcttaatatttatatattatctccagtaatgtataaggatgctcaaaagaacttgcaaaaagagtttcctgaatctataagcaataaattcgaatttctgacatttgctatcgatacatccaaagatgcgcaaggaagtgtattacccggagttggtggaatgatataccccaaactcggattaggtgatatatatgaaaaaaatagatatatacccaatcttgtcaaggaacgaatggcgctataacagaacaggagctacttataagaattatttgcgtagatcagatgacagccagactacatatcatcgtaagcccaccttatcatgaatgacttcatatagtgaattcatgcttctatactcgaaacctatcatcaactctataataaaaaaacactctcattaaggtaaacaattcatctatgcattttagacaaatttattcgcatgtttgaagattatcttataactttgcaatattaaatgactaatgctatagaatcgcatcatcaaccttatatatcactacaaatataatatgatacagaaggtaatataaatgcatatagaatattatacttagaaaaaacagatatggcatatacttttaattttatagatttgtttgctggcgcaggtggcttgtctgaaggatttatccgggccgggtttactcctattgcccatatcgaaatgaataaatatgcttgtgatactctacgttcaagaatggcttaccattacctaaaacagcataacagacttgaagaatatattaagtatctaaaagaaaaacaagaaggagaaagcggacaaaagctctgggaaaaagttcccgacgaggttatcgactcggttatcaatgaagaaatatcggacgaaacattagccgacattttcataaaggttgataaattaaaaggtaataagcaagtagattttatcattggtgggcctccttgtcaagcctattcaattgttggacgcgcccgtgatcctaaaaacatgaaaaaagatccacgaaacttcttatataaatactatttacaatttctaaaacgatatgaacctaaaatgtttgtattcgaaaatgttccaggcattttatctgcacaaaatggaattcatttagaaaacatcttgaaaggtatagacaaagcaggatataaaatagaactgaaaaaattgaaggcatccgattacggagttctccagaatcgtgaaagagttattattgtaggatggagaaaagaattaaatttaaaatatccagaattagaaaaagaagaaaatccatataagattttacccgatttattttctgatttacccgaaagacagcaaggagaaggtagtttaacagatatcgttcaatatgtagctccggctacaggatatttacaacaatctaaagtccgtaatagcttagatttcactacgcagcatattgccaggccccataatcttattgatctggaaatttacaaacgagcaataaaattatggttagaaaaaaaagcacgacttaattatgctgatttacctcctgaattacaaaagcataataataaacaagcctttcttaatcgctttcaagtagttaaccatgaggggtgttgtcataccgttgttgcacatattgcaatggacggacattattacatttatccgtcactaaaacaaatacgttcaattactgttcgggaagctgcacgaatacaatcgtttcctgatgattattattttgaggggagtagaacagctgctttcaaacaaataggcaatgcagtcccagtaattttagcagaaaaaattgctaataaaattaaagagcaatttacttatgaactataatattacagatactacagtagcagagccatgtgcctcctcaatgatacttacctttcgggcaatcggctacaatttggaagcagcagttgctgatattatagacaattccatttcagcaaatgcccaaaacatatggtttaattccgaatggcaaggtggtaattctttcattacaatattagatgatggttgtggaatgaatcatgaagaacttgtacaagcaatgaagcctggtgcaaaaaatccaatggatgaacgatcagaaaaagacttaggacgtttcggtctgggattgaaaacagcttcattttcacaatgccaaaaattaattgttcttagcaaaaaagcaggttttgctcctatttattggatttgggatttgaattatgtaaatcaaacgaataaatgggaacttattcgctatccaattccagacatatttttacacgcacttgatgaattaaaatccggcacccttgtcatatggacagatttagaccgtatcattcctacaaacacattaaattctaatgaaattgcaaaaggcaagtttttagagcaaatggaaaaagtcagacagcacttgtctatgacttttcatagattcatagaagaaaagaatataaaactcttttgttgggggcatgagattaagccatggaatccttttctattaacagaaaaagctacgcaagcatttcctgaagagcatttcaatgaagccaaaatgaaaggatatgttctaccacataaatgtcaccttacagaagaaatatacaaaacagccgaaggtataaacggatggactaaccaacaaggattttatgtatatcgtggcaagcgactcatattagcaggggattggttaggacttttccgtaaagaagaacattacaaattagtacgtattcaaattgacctgcccaacaaattagacacagattggcaaattgacataaaaaaatcgacagcgcgtccaccatttacatgccgagaacaaataaaaaaatacgctcttgaagtccgtaatcgtggtgtagaagtttttcggcatagaggtaaaattcttacaataaggaaacagcaagaatttcaaccactttggctcgaaaaaaagcaaggaaagaaatactcattcattatcaatcgagatcatctaatgattgccgaattcaaacgattagcaaaaatagaaccagataaagctatagaatatcttttacgttttgtggaagaaaccataccgaccaaatctgtcttcattcgtgaatcggaacaaggcgtaaatacagagccatttgaggaaacaaatttagaagtcgtaaaactcatgattaaacaaatttataaaactcaaatagccacaggcaagaatgttgagcaagttaaacttatacttgccagcatggaaccatttaataattttcctgaactcatagaaattgtagactcatatgaatgaaagtgcaaaaaaatattgtgagaattgtttaagcaaacagattattatccatgcagaaacaataaacaaaattatcgaacagtgcttaattgaattcccttcaacaaatacacaacaattaaaagagtatttgtatcaatattgccaagaaaaagcatttaaaaactcccgtgctaacattggcgaaaagtcaagtgcaactgatgaagaaattaacattgccatagaaagaagtgctatgtgttatccgacaatagataaaaagcaactgcatattgaattattgaagttgtataatgtcagacaagaagaatacaaaatgctttttgacaatgaacgaaataccccatggctactagattttaaagcaaatcatcaaaatagtgattggaaattttggaacagatatattacctatctacaaaatagtaaaaattttgctcctaaagttattaatgaaatagatcgtcttaccgatgacattttggacaagctttacgatccaacgattcataatgtaaaaggtatagacaaaaaaggacttgtagtcggacaagtacaatctggcaaaactgctaattacacaggactgatatgcaaagcagctgatgcaggttttaatcttatcatcgttttagcaggtatgcacaacaatctacgcagccaaacacaacaccgattagatgaagactttttaggatttgatacagcacacgaaagagcatggcaaacaaacggtacaaacagaattggtgttggtgtattagacaataataatacagccatttccataaccacaataaaatctgattttaaaaagtcattggctgacagtttgggaattagttttgatattcaaactccattgttacttgttgtaaagaaaaatacaactgtactaaaacgtcttaatacttggttgctttcacaaacgcaagaaattaacggtgaaaaaagaatcacaaataaatctttacttataatcgatgacgaggccgataacgcctcaatcaacaccaaaaaagcagatgaagcaccaacagcaatcaatggatggatacgaaaaatcgccggacatttctatcgctttggatatgttggctacacagccaccccatttgccaacatctttattccacttgacaaagatgacctattcccgcgggattttattataaatctacctgcaccaagtaattatataggcgctgaaaagatttttggaacctcattagaagtaaatgatacaaacgacgatttattacctattgttcgtaaaataaatgattatcaaagcttttttcccgatagtcataagaaagatgatgaaccaccaacatcactacctatatcattacaaacagctataaagtgttttattgtaacttgcgccattcgcattgcacgaggacaagcagacaaacacaattcaatgctcattcatgtttcccgttatttaaattggcaaaattcacttaaagaaattattaataatttatttctatactacaaacgaggtattgaacaagaggacaaaggcgtcctaaaacaatttcgagatatttttgaagttgatacggaaaactatatttcatattgtactacaacacagaatatactaaactcttcgtttaaagacattgacagcaaaataaaaatacatagttgggaagatataaaacctaacttgtataaagctgtacagaaaatcaaaataatgtcaatcaacggtcaatctgctgacaccttggagtattacgaaaatgaaaaaacaggaatttcagtaatagccattggtggtgacaaactttctcgaggattaactttggaaggactatcagtaagctactttttacgcgcctcaaaaatgtacgacactctcatgcaaatgggacgttggtttggctatcgtcccggatatgttgatttatgccgtttattcacaagcagtgagctcaacgaatggttcagacacattacaatggcaagtgaagatttacgagaggaatttgacgcaatgtggaatgcaaaagctacaccagaaaaatatgctttgaaagtacgtactcatccaggccaattacaaattacagcaatcacaaaaatgcgcaatgtagatagaatacaagtatcatggtctggccgtttagttgaaacttatcaacttccaaccgacaaaggggtaatccacaagaacctagtcgcaacacaagatttcctttcaaagttgggaattcctcttataaaaggcagcaatgactatctctggttaaaagtctctcccatagatgttctaaaattcttttcagagtttacagtccccccacaacttactaaagtagatttaacattaatcagcaattttattcgcaaactcaatcaagctggggaactcggagcatggagtgttgctttaatgaacaaggccaacgcatcaaaacattttacagtatcaaataaagtcagtgcaggttgttttattcgaaacacagcaggagacaccgagacttatataattaagaagaatcatattatcggaaagcaaacagatgaattcattgatttggataatgccgatttatctgatgcctagctcgcatcaaaacaagacaaagactggaaaaagaactatccaaaacctaaacttgttcgagaattatcccgtgatgtaaataatccattattgattatctatccgcttgatcctttaggtgcaaatccaaaagatgaaaatagtataactatttttcaggaaaacgatgatgtaataattggttttgctattgtttttcccaaaagtaatacacagcatactgtagaatttgcgataaatacctctttagcaaatgaatattatcaatctgaaattgattttgatgataacaatgataacatagaagacaatgaataaaaaataggaaatatgggagtatattgaacaatccaacgaaatcggattgttaaagcgattatatacaaatgattctgaattatttatttatgctatttttcaaaatccagaaagacattgtggaattgctttatcattcaatgaacatacacatattgatatttcctctttctctaatttgcgtgatctacaaattgtcttaatgcatgataaatcattcccatgcaacaagctacttatcataaagttattacattaccaaagccgcgatattttcgcagtcatgtgtgaaaatatgatacaatcagttttatcattacattctgaaaaacaaatcgcaaaaacgatcattaatcaattagaaaaatggcaagcacttttcgaaaagttgaaaggtgaaggtttaacatcatcagagcaacaagggctttatggtgaattacattttttacaaaagattatcatcaggcaaaacgctattgcagctctcaacgcttgggtaggaacagataaggaaatacgcgactttcagtacaatgactgggcgattgaagtaaaaaccacatctggcaacaatcatcagaaagttaatattagcaatgaaagacaattagacgagacattattaagaaatttatttctatttcacttatcagttgaagtagccaaaaagaacggtgaaagtctaaatagtaaaatcgatactattagaaaggtgttgcaagacaatatttctgcccaaaacttatttaacaataaacttctagaagcaggatactttgatagacataagtacctatatgaagaaaaatgttatcaaattcgcaatgaaaactactacaaaatagacggagattttccacgtatcaaagaacaagagatccgtaatggcataggtgatatcaagtattcaattatactttcacaatgcatggattatttaatttctgaaaatactgtatttgacaaaataagtatcttatgagcgaaataaataaatactacttatccttattacaagagattcgaacaatgcaagacactgctgaaaatggagcaagccaagagcagctatttacacagattgcattagaaatgcttgcagaagctggtgaaaccgaaaatgccacatttgcatatgatgagaaagaactaggaactaaagggcaacacaaaattaatggttatgcaatgtctgacaattatgaaacgatagatttatttatttctatttttcagaatacagaagtaccacaaaaaattacaaaagaagaaatagatagagcggccaaacgcattacaaactttttccgaaaagcattttacaatgaatatgctaaagatattgatgaatcatcacctatttttcaatttgcatatgatttagctaaacttccagaaataagagaaacacttgtacgggtcaatgcaataattctcaccaacggtacctacaacggcgatatccctaaacaagaaaaggttgccggacaagacatttattacaatatctttgatattaaccgcttatacgcgatatctgaaaaatctcatatatctattgaactggattttgatgaacagcaaatcaaaattccttgtttgaaagctcctattgataatagtgattatgaatcatacattgctataatgccaggacaaggattagcaatgctatacaaacaatttggtgctcgattattagaacaaaatgtacgttcctttctacaattcactggaaaaataaacagaggaatacgaaaaaccattaacgaagaatcacatatgttcttagcttataataatggaatctctgcaacagctgacaacatagaacttgacgagactgggcattatgtaaaaagaatcagcaacttacaaattgtaaatggtgggcaaacaaccgcctccatttatcatacttgggataaagacaaagctgacatttcaaatattttcgtacaaatgaaaatatctgtcatcaaaaaagctgattcttacagtgagattgtatcgcgtatttcccaatatgccaatactcaaaacaaagttaataatgcagatttttcggccaataatccaatacttattgaattggaaaaaatatcacgccgttcattctcgcccattactccacaacgtaatattccaacaatctggttttttgaacgagctaatggacaatataaaaacatgcgcttacgtgatggatttaccccttcccgagctaaacaatttgatttaaaatatcccaagaagcagatgttcaaaaagacagatttagcaaaattcgtcaattcttatggggaaattcaagaaggcaaaaaactaactatcggtccacatattgttgttcgcggaaatgaaaagaattatgcccaattcataaactacaacttgcctaaaaaagttacaggaatatattttgaagatgtcattgccaaatttatattatttcgggaagcagagaaactgtatggcatcaaacccaataacattggtgaaatgcgtaatgcagttgtaccatatgctatttcactgtttggttacctcactgattataagcttaatttagaaaaaatatggaaaaatcaaaagatctctgatgagttgtcagcagcactctattcattaatgaaacaacttaatgaattcattttgcataactcaccaagttcccattatattgaatgggcaaaaaaagaagattgttgggaaactataaaacaacaacaatggaatattgatattaatagtattaaggctgattttgcaacagatgaacaactaaaaaaacgtaagtcagccgctgacaatttagatattgattcaattcaaaaagaatatgaaactgcattattgcgttcaattccatacgctctctggaaaaaaattgaagaatggggaaaagatacaggctatctaaccacgagtcaacaatctttcgcgggttttgatatggcaaatactataaaattcaatagaaaaattacagataataatcgtaagaaagctatgactatttacgaaattgtttgtacgaataatattgagctgcttgcagaagctgatgaactcacagaggagcaaaaaacagacctgtcaacaactgtaaaagacagtacaagtgcagaccacggaataaccattgagttaatacaaaaaatggttgcttgggataaacatcgccgtattcttaaagattggcaatggaatgttatgaatgaaattatttcaggaaaaaaaactttaaatgatcgtctagcatggggatgtaaacaaaatctcaaaacattaaaacaacacggtttcacagaagaataatttttcagacactgtccacaatcttgtgtaaatagaaaactatgagaagaatttgcaatgaagagtttatattcgcgcagagcatttactcttcactatatcctttttcttcccctaatagtcattcaaagaaaagtttctagacaagtataatttgcattatagttttctaatactatcttattcaaagtatatactaaccctttcaaattttgttcccggactttacttttcaattgacattcccataacaagataacatgccatcccatatttcggagttgcattcgttctttcaaatctcgttctttattcctttctattttttctttccagaattctgtattggtcttcggcaaaacataatatttacacccttcatgtccatgccagaaacagccatttacaaagatcactgttctatactttcttaacacaatatcaggagttcctggcaactttttcacattaacacgaaaacgaataccttgggaaaatagatatttccgcacaagaatctccggcttcgtatttttactacgaatattcgacatacacttccgccgttgctcttttgttaaaacatctaccatacctcaataaaatttaaatgcaaaagataaatgattcctaatgcaaagataaaaattatcatccatgaattataatattaaacacaaagaatgcactcattatctcttcaatccccatactctcaaaacaagcaccgaaatatttatggacgcctttaactaaattcgcgatattttcactacattcacagcatgaaatgcagaattatactcaaactattagcaattctcttttttacaggatgttataacagagaacagatttcccggcttgatgaggcggaagcactgttacaaaataagccggatagtgccttaacaatattacaacaactcaaatcggaaggcggccaggctgaacaagccaggtatgcgttgctttattcagaggctttagacaaaaatcacatcaaagtaaccaatgattcgctcattcgccaggcttggagccattataaacatcatcccaaagatttacgccgccaatgcaaaactctctattattggggacgggttaaactgcgcgcaggagacaaaccgggagcgttacgtcttttcctagaaattgaagagaaactgaaagataccaatgagccttattatgcaggacttttatacagtcaaatcggtgaagtgtattatgaccaaatgaactatagccgggcttatcattattttcgtgaagctcgcaataacttccggcagactgataacactcgtgaagaaacagaggcaactctcgatatggcagccgcaactttcaattcaaaagatatggagaaagccatgcgactctattctgccgcactcgatttggctgatgagcacaagtacaataagttagccaaagccagtctcaccaatcttacttctctctatgtggtgtcaggcaagaaacaaattcctcatgacctactgcaacgcatcgaactctctgcccggcaagatacgttatacggataccatacattagtagatgtgaatctactaaaaaaccgtatagacagcgcacgctactatctggcacttgcagaaacacattccaccgatatacgtgacatggcagacctgcaatacaccgcttatcggattgaagcgcaggccagaaacttcgagaaagcgacagagaagatacaccattatatctatctgactgactcgctgacacgttcaaatatgcaattctccgccggtatggtggaacgtgactatttcaaggaacgctccaaatttgccgaataccggatgaagaaccgtactacctgggagattaccatagcaagcgtaatttttctaataataggggtagcatactacatcatccgtcaacgtctgcgcctgcaacgcgaacgtaccgaccgctacctgctattggcggaagaagccaacgcccaatacaaaactctgacagaacatatggaaggacagcgcaatgcagaaagccatttaaaaggtttgatagcttcacgattcgacatcattgacaaactgggaaagacttactatgaacgtgagaataccgcatcgcaacaagcagccatgttccacgaagtgaaacagattatcaccgattttgcagagaacaatgcaatgttgcaagaactggaacttatcgtaaatacctgccatgataatgcaatggagaagttgcggaatgaattttcgtcaatgaaagaagctgacatacgactgctttgttatatttttgtaggtttctctccacaagtaatcagtttgtttatgaaagatacggtagctaatgtatatgctcgcaagtcacggctcaaatcacgtatcaaatcggcagaaacggccaataaagagttgtttttagcacttttcggataggtgttagacctgtgttagaaatcttagaatacatctttcataatccattgaatatcaatatactttaaatcaaagtgttagatttgcgagattgcatcacaacccgaatttgatgcaatcttattacttttgcattcgaaaaattagaaaaaagaaaagattatgaagaagattgttattctattaagcgccatgcttttcatggtagcatgcgaaaaaggaaacgaagaaatgaaagaagcaaaagtagtggtatccgtttatgatgagaatggaaaaattgcaacgggcgttcccgtaaaaatgtataatgaaaaggattataaggtttttgaaaaagataatttaactttgccaactgcaatcatacagacaaatgaaagtggtatggccacctttgtactgccacgagaggaatggtttgcaacgcagtcgcaacggttcctgacattcgtggtacaagaagggggcggccctaacaactatcagatatggtcttccggcaaaaccgtagaagccggaaaagccgtaaaagtagaaatacgtttaacccaattccctaactaagcctttatcacatgaagcaaactagactttatataattacagcactttgcctgcaaatgtttttgggaacaatattactaagttgcagcaccgaaaatgacgaatacaggaaagattcaccttcggcagcaaatcctgttgaacccataggggcttcacttgaagatttctccatagaacaattgcccgcaaaaacaatttatgcattaggagagaatatagacttaaccggccttaacgtgacaggcaagtatgatgacgggaaacaacgccccgtaaaggttaccccggaacagatcagcggtttctcttcatccacgcctgtcgaaaaacaagaagtaaccatcacactggaaggaaaacagaaaagcttttctgttcaggtttcacccgtccgtatagaaaacggagtattgacggaaatattgaaaggatacaatgaaatcatacttcccaatagcgtgagatcaatcccgaaagctgccttcagcaacagccaaacagcaaaggtagtactcaatgaaggactaaaatcgattggagatatggctttcttcaattcggccattcaggaaatagtatttccatcaagcctggaacagatggaggaaaacattttctactattgccggaatttgaaaaaagcagatttaagccaaacgaaactcaccaaacttcccgccagcacttttgtatatgcgggcgttgaagaagtgctgctgcctgcgacactgaaagaaatcggagcacaggcattccttaagacatctcaactgaaaacgattgagattccggaaaatgtaaaaacaatcggattggaagcattccgggaaagtagcgttacaaccgtgaagttaccgaacggcgttacaaccatggcgcaaagagccttttattactgcccggaattggcggaagtgaccacctacgggagtactttcaatgatgaccccgaagctatgatccacccctattgtcttgaaggatgtccgaaattggctcgcttcgaaatacctgaaagtattcggatattgggacagggattactgggtggtaataggaaagtgacccaattaaccattccggcaaacgtcacacagattaatttttcggctttcaataatacaggtattaaagaagtaaaggtagaagggacaacacctccgcaggtatttgaaaaagtatggtacggatttccggatgatattaccgtcattcgtgttcctgccgaatctgtggaaaaatataagaacgcaaatggttggagggatttcacaaacaagataacaacgttctaacagttctccagtttttcgattataatcgaataaagttggtttaatatcgacttttccggttataatcgaaataacttaagaaaacactatattttcgataatagccggaaaaatcagtactattagtttatctatttaaatctccccattcacccccaagccgaacagagcaaaatcgcccagacaaggatcatccggaaagactgtagccaatgctgccgttatctgacgggcatttttcaaagaaaaagtttccgtatccgtcaacttgaaataatgtgctacccggcatacatgtgtatctaaaggaacaatcaaatctctgcgatcaaaactttcccaaatccccaaatcgacctccgaatcccgacgaatcatccaacgcaaaaacatattcagtttcttttgaggacttttggcagaaacttcaagaaatgcacataacttttccattggtattccgggatataacatcaaagcttcctccagactttcaaactgtgtataagctatatataatcgccgaaagtatccataaaaatcagcatacgacaacatccgataaaagctattggttgctcctgaaggaaaatccttctcccactggcaggacaatacatactgataaggcgaatctcccattagcccgtgcaattcgtccgctttcttcaagatctgtttgcgattgccaaaactcataatcgccgtcagcaaaccgctgacttcgatatcctgtttcagcgtataacgatggggaaactgcaccggatcgctttgtataaagtctgcgcgatgatacatctccgcacacattaaaagtttattctttatatcttcagtcatttcgagaaagtatcaagtattgaaagtacaaaaatacatattctagttggatttcctctttaagtaaatgatagattgtatccctaataaaataacaaacaaatattctgccgtcatatacacagtcagagaagcatgaaaacattcacttaacagatacagataaatcaaatatacaagaatggtgattaactggaagataaaggcgagcttcgtctttcctgtaccggtaacagcattgatataaacatatccgggcagtgcaaaagcataattcaacagcataactataaaaggatagaaagctagtctcaccagattatcgttattcgtataaaatccgataacccattggttaccccaaagagccataactatcaatggcccccccacggcataacccaacctaagaactttatggcaaacgggaaaaagttccttcccctgccccgccccaattagattgctgactaatgaaccagtagtggatgcaaaagagttgacaatcacaaaaaagacggtagaaacactacgagtaatattggaaatagcaagctctgtccttcccagatgctcaatagcaacgaagaacagaaaccagggagcaacgctgacaaaagagtgaagcatactccatacagatatcctcaacaactttattaacactttcccatcataaacgaccttcagcccatatttcactttatctaccctcacccacatatataataggagtacgataaaagctccgaactctgccaaagaagaagccatcgccgccccggatatacccagattcagtttgaatatcagcagatagttaaaaggaatattgatacagatagccatgatagctgccacggacaatgctttggtcgttgttatccctaccagaaaagaccggaaagctaaaaaaggaaatgagaataacaaaccgaagctacgccaatccagataatgaatcactgcctgataaatttcatccgaagttatcaaccggcacaggatcaagggagaagccaaatggagcaataggcaaagaatgactgccatccccgacaggaaatatactccctgaaaaaatgtacgtcccgtctctttataatgttgttccccatttctccgggcaatcatcacctgcagcccgatgctaaatccgaagcccagcatataaacagctaaataatagattccggcaagcgcagaagctcccagttcgacttctcccacatgccccaggaaaatagcgtcggtaatattgattaattgttccatcagaatgctcatcatcacaggaaagttgatgagccatatttgcttatatgtataattcattgctcaacttaaaaataacacgatacggtataccacatcatagcagcacacagttccgtaaatttataaaaatggatataaaactctttggcaggcgagtagttgcctgtcggatagctgaatagccctgttagaaatgatgctattcgttgagcgtagctatatgcagagtttcataaatggatgaatattgctggtttatcaatcaattacgcaacaaagataagaaatcttattttcatatcccaatgtggtatggtattagcagattacttatagtaaagaaatgtattaaaaacattgattgcaacattaacagattgatttatacagatataccatattctaaagctaaggaatgattcttaaatatctttctcttttgaaaaaaggcatatcattttgaaaagagtagtaaccaataaataaccagataacaatgaaagtttgtaaattcgagaaaattaaagatgaggatgaaatgaagcaagtaatcaattgtattcagaaagaacatccttatgtagctgtagtccctatattggcacaattacaggagtggctacaggctatttccatcagttggtttcacgaagaagatgaagcttctcatgccacagtcaatgccatcgaagcatattgctatacccttgccaatcatctcgttacagattcgcacttaaatcaggaaattaaaaaccggattctggagtgtataaagaaaatacatatacttgtagaagacaaagcagatttactgattgataaaatgataaaagcggaagtatacggattatccagtgatttattcacttattgcttacgtcaacagggtcttcgtgcccaaacattagataccggcaaacttatacagatcaacctggaaagaaagccggatatcccatatattcaggaatctatccaacaatacattgacgagaaccggaatgtggatatttttatcgccccactttccatttgcaggaatgtgtatggtgaaatagactttatgagcgaacaacgcaatgattactatgcaacagtgcttgccaccctattcaaagcggacgaaatactgttatccacccctatcaaccatatctacgcaaaccggaattgcctgcgagaacaacattcactaacttacatagaagccgaacaactgattaacagcggagtacacctgctctacgcagattgtatcacccttgcggcacgctccaatatagttatccgcctaaccgatatacacgatctgtcaacagaacgactctatatatcttcccatgacacaggcaacagtgtcaaggccatcctctcacaggattcggctacctttgtacgttttacctcattaaatgtattgcccggatatttgtttatgggtaagatattggaagttatcaacaaatatcaaatcaatgtcatctcaatggcctcatccaatgtatccatctcgatgatgctgacagccagccgggacaccctgcgaatcattcaaagggaactacataaatatgccgaaatggttatggacgaaaatatgtctgtaatacatatcatcggctcccttcattgggaacgcacacaagtagaaagtcatattatggatactatcaaagatatccccgtatctctcatttcttatggaggaagcgatcattgtttcacactatctgtacataccacagataaaaacagactgattagttcgctatccagacaatttttcgagagtcagtgcgcagcctgattcaaagccggataaaaagagacatctgaaagccaaataaaaaaataaagagatgaaaatagctattataggagccggacacatagggagtgcaatcgtcacttgtctggcgcaaggacatctttacaatgagaaagacattattgtctccaatccaaacattgataaactggagagactgcaagaacatttccctgcaatacacataacgaccgataaccaacaagccatatcggaagccgaagtaatcgtcctcgccatcaatccctggaaagtagatgaagtattgtcccctctacgtttctcgcgtacacaaatcctcgtatctcttgtgtccggagtatgtatctcccacctggctcatttgacagaagccgagatgcctatctttcgggcagttcccaatatggccattacagaacgttccagcctcactttgatagcttcccgcggaaccgataaagaatatcagcaattaataaaacagatatttgaagaaggaggaaaatgcctgttcctgcaagagaaacaactagataccacttccgcattaacctccagcggaatagctttcgccttaaaatatatgcaagcggttatgcaggcagggattgagctaggaattcccggcaaggatgccatgcaaatggcagcgtatagcatggaaggagcgacagaactgattctgaatcataacactcatccattgctggaaatagagaaagtaaccactccgggcggaaccactataaaaggattgaacgaactggagcacaaaggcttcacttcttctattattcaagccatcaaaagcagtgccacaactttgattgacaaagaggaagaagatgcaaaaaatttccgatagtccttatggtatggtttctcaagtcctttttgcctattttgaaatgctatatatcccaaagccagcataaaaggacttaagaaaatgtatgcttagattttatattcctctatcttccggtacagggtggtaagtccgattttcaacaaacgggcagcttccgttttattcccctttgtatattccaaaacacgtgcaatatgtctgcgttccattgcggccaactcaaaactgcctacactatcatccgaacattcataatgagtgttttggatttccaaaggaagatcacaaatatccagtcgccccccttcacacacaatcaggctacgctcaatcacatttctcaattcacggatgttccctttccacggctgttgttccagcgcttccagaaaagcgggagtcatctcattgatggcatacgaaagtttttcggagaaacttttggcaaaagcagttgcaagaattctgatatcaccggtacgttcacgaagcgaaggaagatgcacctgaaaaaccgaaagacgataaaacaagtcttcacggaaatgtcctgctttgatctcctcctgcaggttgcggttggtagcagcaatgatacgcacattgactcttgtcggcttggtatcaccgatctttatatattctcctgtttcaaggatacgcagtaactttgcctgcaattcgaaagccatctctccgatttcatccagaaagatcgttccgttattagcttcttcaaaaagtcctttcttatccttcagcgcaccggtaaacgagccagccttatgtccgaacatctcgctttcgagcagttctttactgaaagacgaacagttgaccgccacaaaattctgtttgctccgtttactactataatgtatagcttgcgcaaagacttcctttcctgttcctgtttcccccgtcagtaatacgggaacatctgtcacagacactttctgcgccagagatacagcctctttcaacacctttgactcacccagaatagaatcgaacgagtacatctgcccgactttcttttccagtttttccaaacggacattcatctttgctttctccacggcacggctgattaaaggaataatcttgttattatcatctcctttcgttatataatcaaatgcaccgtttttaatagcctgcaccccgtcgggaatattgccgtgagcagtaagaagaatcacctctacattgggagctattttcttgatattcaacaccagatctactccgtttccatcaggaagaaaaacatcgcataaagctacgtcgggcgattgaatttccagttgtttgagggcagctttgcaatcacctgcctgacacacttcatagccctcaagttccagcatacgatctaaaaggctgcgaatctggacttcatcgtcaataataagaattttattcatacaatttgtctacattaaatagaagaatgaaaaacagggtgcgcaaatatagtttttttatctgaatccatgaacatttcttcaatacagtttgttttttccacaggaaactatttacactataaacagatgaaaataattattattgggggagttgcaggaggagctaccactgctgcccgaatcagacgagtagatgaaacagcagaaattatccttttggaaaaaggaaagtatatatcatacgccaactgcggccttccttattatataggaggagtgatagaggaacgggataaattgttcgtgcaaacgcccgaagccttctctacacgcttccgcgtggatgtacgtacagaaaacgaagcgattttcattgaccggaaaagaaagacagtgaccatccggcaaagcagtgaagacacttatgaggagagctacgataaattagttatctccaccggagcttccccggtgcgtcctcctcttccgggaatcgaccttagcggaatcttcacgttaaggaatgtcaccgacacggatcggatcaaagaatatatcaagagccacgctccgcgaaaagccgttatcgtaggagccggatttatcggtctggaaatggcagaaaacttacatacacagggagcgaaagtgtcgattgttgaaatgggcaatcaagtgatggctcctatcgacttctcgatggcatcgctcgtccaccagcacttgatggataaaggagtcaatctttatctggaacaagccgtcgcctcttttagccgggagggaaaagggttgaaagtaacgttcaaaaatggtcagtccatttctgccgatatcgttatcctgtcgatcggagtacgcccggaaaccagtctggcacgagctgccgaactgactatcggccctgcaggaggtattgccgtgaatgattacctgcaaacgtctgatgaatcgatttatgccatcggtgacgcaatcgagttccgccatccgatcaccggaaaaccctggctcaactatcttgccggacctgccaaccgtcagggacgcatcgttgcagacaacgttctcggggcaaaaataccttacgagggttctatcggcacttcaatcgccaaagttttcgacatgaccgttgcttcaaccggtttacccggcaagcgcctccgccaggaagagatagattatatgtcatctaccatccatcccgcctctcatgccggctactatccggatgccatgccgatgagtatcaaaatcactttcgacaaaaagacgggaagattgtacggcgggcaaatcgtcggttacgacggagtggacaaacggattgacgaactcgcccttgtcatcaaacacgagggaacgatctacgacctgatgaaagtggaacaagcgtacgctcctccgttctcttcggccaaagatccggtagcactggcaggatatgtagctgaagatatcatcacaggcaaaactaatcctgtgtattggagagaattgcgagacattgaaatggaaaataagttcctgctggatgtccgcaccccggacgaatattctttaggcagcctaccgggtgccgtaaatattccgctggatgagcttcgtgaccggctggccgaactgccgaaagataaaaagatttataccttctgcgctgtcggactacgggggtatcttgcctaccggatattgactcaacatggatttgacaaggtgcgtaatctctcgggaggactgaagacttatcgggctgccactgctccgattatcatacgcgaagaaaatggaaatgaaatagacgaatcacccgaacaacagggaggtagtccccaagttgggcaacctgcggttgctaaggtttcggataccacggttactgccacggctgccgtcaccgccgatgcccaggcaaaccccgctaaaacagttcgggtagacgcctgcggattacaatgtcccggcccgattttgaaaatgaagaaaacaatggatacactggcttcaggcgaacgggtagaaatcacctcaaccgatccgggatttccgcgtgacgctgctgcatggtgcagttcaacgggcaatcaactgatttcgaaagacagctccggaggaaaatctgttgttgtcatagaaaaaggagaaccaaaatcatgcaatattgttacttcatgtgagggcaaaggaaaaaccttcatcatgtttagtgatgatttggataaagccttggctacttttgtactggcaaacggcgcagcagctacaggacaaaaagtcaccatcttctttactttctggggactgaacgtcatcaagaagttgcacaaaccggaaaccgaaaaggatattttcggaaaaatgtttggcatgatgctgccttccagctccaaaaagctgaaactttctaagatgagtatgggcggaataggcggaaaaatgatgcggtatatcatgaacaaaaaagggattgattcactggaatccctgcgccagcaagcgctggagaatggtgtggaatttatcgcttgccagatgtcaatggacgtgatgggagtcaagcaagaagaactcctggacgaggtgaccattggcggcgtagcaacgtatatggaacgggcggataacgcaaacgttaatctatttatttaaaaaatgaacaaatgaaatatttaaataaggtatgaaaacaatatgtgcaatgcgtgatgtattcaaagcaatgggaaactttgaaacagcatttgaaaaaatgtaccagataacgcttaatgaagcaatgatattgtgtgcccttaaagaggcttcggacaaagtgacggctaccaacctgtccaagcaaaccgagctaagcccctcacacacatctaaaatgctgcgaatactggaggaaaaaggactgatcgtccggtcgctcggaagcgaagaccggagacagatgtacttccacctgacccatacgggcaagcagcgagtaaatgaactggaacttgataaagtagagatacccgatctacttaaacccctgtttaaataaacggattttcaaacaattatctgtaaataatgaacggtgagcaaactccctgataatggggcagagtgctcaccgtttttctttaaacagggcaaaagatatatgttaattttccggcaaaagaaatttccatctgaacctttttccacctttcttgttgtttctatcaaaagcccaaggtacctgggcgcgatttttatataacctaaacattataaaagatatgaagaaattaattcctattttattggcggtctttgcactcgcttcatgtgaaaaagacccggacatgggtaaactggatgacaattatctggtatacactaactatgacaagaaagccgatttcaaagttcctacattctatctggcaccccagattctggtgattagtgacagtaaagaaccggaatatctcgaaggtgaaggcgcagaacaaattctggctgcttatacagacaatatggtagccagaggctacgaagcagcagcagaccaagaaagtgcagatcttggtatccaagtgagctacatcgcaagtacttattatttcaccagctacacacaacctgaatggtggtggggttatcccggatactggggacctggctactggggtggcaactggggtggtggatggtactacccgtacgctgtaacttatagttatagcaccaactccttcctgacagaaatggtgaacttgaaagccgaacagggagacagtaaaaaactgcctgttgtatggacaagttatctgaccggatttgaaactggttccaaagctatcaaccgtactcttgcagtagaagctgtcaaccagtcatttacacagtcaccttatcttactaacaaataaacaactacaactgttatgaaaacaagaaaaaatatatacttcaaggtagtagccttggcggctattgccatcgccttcgccatgccggctaaggcacagctatcagacaatggatatgcgaatatcgactggcagttcaatgctccgctaagtaatcactttgcagataaagcaagcggttggggtatgaactttgaaggtggttattttgtgactcctaacattggcttgggtcttttcctcaactatcacagcaaccacgaatatgtaggtcgcgaaaccttccagatgggtgccggtgaagtgactaccgatcagcaacataccattttccaattgcctttcggtgccgctgcacgttaccagtggaatcgcggtggatctttccaaccttatgtcagtgctaaattaggtgctgaatatgcaaaagtccgctctaacttcaatatgttggaagcaagagaaaacagttggggattctatgcttctcctgaagtaggtatcaatgtattcccatgggtttacggaccgggcttgcactttgctttgtactacagctatggtaccaacaaagctgatgtactgcattacagtgtagatggattgagcaacttcggtttccgcctgggtgtatcgttctaaaaagaactgcaactatcagaatattacgttaataataaaaaaggtaaaaggtatctatattaaaagctaccttttacctttctttttttattttttcttcatcgcatcataaatagctccctgtattcgctcacgaatgtgcagctggttcaatttgcggttcgttacgtccggataaatccggttgctaagaaatacataaaccagttcattcattgggtccacccatgcacatgtaccggtaaatccggtatgaccatatacttcggcaggtgcagcaggcgcacaatttcctttcttcggatcatctgcatcgggcttgtcaaaacctaaaccacaccggctgatcttcgagatttcagtagtaaacagctggcaagtttctttgctaagataacgttgtccatctatttctcctccattcagcaacatctgataaacgcgggctacatcacgggcagtagagaaaagtccggcatttccggccaatccgccaaagaaagcggaagcctcatcatgtacaaatccctgcaaagtctctttacgcaagaaacggtctttgttggaagggacaatttccgatttggcaaagcggcgtaaaggcaggtaacctgtatgttccaaccccatcggctcataaaactcacgttgcaaataggcttccataggcataccggccagttgttccaccaacattcccaagagtataaatccgacatcactatatacatagcgcttctgctttaacggagcttctgcaattttctcttctatcacctttcggaaagaacggtttaaccacaaactgtcacagatctgaacagtataatcaccggtcttgaccggagaaatatattcactcttgaatttgaatttcggattcgcccacgtagtcgtaccaatctgtaccggatggtggacatctttacgtgcgctgaacaatcttccatcatagctatccttgtcaatagcttcctgataaaaaggaatccaggaaggtaaaccggactgatgatacagaatttcctgaatcgttatatctttcttatcagtacgttgcaaaaacggcaaatgatccgaaattttatctgtcagattaaaacgtcccttatcgtagagtttcataatggcaagcaaggtacccgtcgtttttgaaagggaagccagatcgtagatattcgtcgattcgacacgaggacttcctttacccgtataagtaccgaaagccttgtcgaacataatatgaccgtttttcagcaccaccacctggcaaccgggataggctccctgacgaataccatccaatgcaatggaatcaatccgttttagatgagcagaggaaagcccgtattcttccggaacgaaatgcaacggcgttttaggggtaatagtcactcctgctcccgttgggaacagttctcccagacttgccgacaactgtccgtctgcagatgccttggcaaatagcacatctgccacctggcgctgcacgtcactactatagctatgtcccagcaccaccgccgaagcatgagccaccgcacgctgaatctgcaacatcatcttcccgggagtaaaaaacagataaatggccgggctttcgggaacaaacttagcaaagaaaggctgataaggagccagccgctgttcactgacggctacaataatccgtttataggtagacaaagaatcacgcaaccgctgattttcctctttcgtctgattggcacgaagggaaaaacgagccaaagacgtatagcgggaaagttgtttcgccaacgcatcagtttctccgggatctcctacctcgagcaatgcaatcgtctgctctttgtctgtatgcaaggggagaatatgattcttgttgttcagaactgttattgccgctaaattcaaccggcgaaccaaatcacgcgtttgcggactgttaatccgttgttccagaccggataattgtacatacgactttttcttcagtcccaacacatatttataagtcaagaccttacgacatttgctttcaatatcttcgcgggtcaactctcctttttcaatggcttccagtacggccggtatctcttccttcaagtttcggggagacaataccatgtcattaccagctttcaaagcctgcaaactgacatttccatttcccgccactcctttcatggcaagcgcatccgtaaatatgagtcctttgaacgccaactcatctgtcagcaaatcatatacgacattgcgggacaaggaagacggaagtccaccaatcggttctatcaccggaacttgcaaatgtcctaccatcataccgcccaatccggcacggatggcttctttaaaaggataaagttccacactgtccagacgctcacgagtgaaaggaagtaccggaagcgccttatgcgaatcaacatcggtatctccatgtccgggaaaatgtttgcacacagataaaacccctccgctttccaaaccggaagcataagcgataaccttatcagccacctgtatcggatcttctccaaaagaacgggtattgattacgggattttcaggatttatattcacgtccgccaccggagcaaagttgacctgtactccaatctgtcggcattgacgagcaacttcacgcccgtattcatagagcagcttgttgtcacggatacatcccaataccatattccgtggaaaaacaggcataccacgcaaacgcatggccagcccccattctccatcaaaggtaatcatcaaagggacttttgcctgccgttgcgcccggtttgtcagttcaacctgattttgcatcttcccaccggaaaagagaagtccgcccactttataggtgtcgattacttcgcgcaacagttccaggtttcgtttggtatctaccggggcaatggtatagatgaacaactgccctaccttttctttaaaggaaagcttatccataaccgaatcaacccagtgccggcagtctttgtcctgaagggctttatacaccagcagaggttcaacggttgtagcattctgcgccggacttgaaaccgtaccggccgcaataaggaataaaagcgttactattgaggggattatcttcatttatgtttcaaagtcaaatcgagacggcctacacgaacaccattttttcccgtgtgcataacaggcacctcttttccgtccatattcaagtatgttttggggcctttcataaatgtatgagagtgcccgcccagaatcacgtcgatattgcgtgttccggcaaccagatgttcatccatttgaatgcccagatgagacaggcatactaccaaatcacaaccttcttcgtctttcaacaaagcagctatttcgttggatacgcggataggatcttcataaacgactccttcgcatttattagcctgaatcatcccttcgggttgggttccaaggccaaacacaccaattctcaaaccatatttctcaagaacgacgtagggtttaactatatctttcaataccgtagcatccagattatagttggcacaaacaaccgggaaattagccatcttgaaaatacgttccatattatccacatcgaaatcaaactcatggttaccgatagtcatagcatcgtaacccatttcattcattagtttaacttccacttctccgcggaacatattataataaggtgttccctgagaaatatctccgcagtcgaaaagcagcacattcttatgctccttgcgaaactgttcgagaaaagcagcccggcgaagaaaaccgcctttgttatagtattcgtcccccttctgattgacaggttcgatacggctatgcacatcgcttgtttgtaaaataatcacttctttggtatccttatcctgcgcaaaaattgagaaagtaaagctcaatgcaagacataacaggaataatatctgaattcttttcatattcaatatttttagattctcctttttattttatggtaatacgtccatccagtttggaggtaatcgctttgccttcggcagtctgtttgcgtacataatcaagaaatagtccgcgtaaggttgcgtcttcggggcatactctcttttccgcctgcaggaaagcatccatccgtccatttccatctgccagatagtcgatagtggccaccgtgtaaagctggtcatcctttagtggtttttcaccgacaaaggcgttcagcaactttccatctttggtgatttcaagacggataccgctcactccttctccgtgcagagatgcaatcgcttcaaaaagacgtctcaagtctgttcctttcatagtcagtacgcaaagagaattctcaaaaggaagaatttcaaacacatcgcctaccgtgatatctccttcgggcaagatattacgcaagccgcccatatttaccaatcccatatcagcaggtttccccaacacctgaacagccgcctgctgcaaaacacctgcaacaaggttggaaagcaaactttcgggacctcctttgtccattttcatcgcactggtgccgatgacttcatacatcatcgcatccaccttttccttataaggctttaagatttcggcagctttcgcgttgggaatggtgtcccaaacagaatcaatcgttatcatgctaccctctactttggttacttcgtactgtgccgtagtctcgcgtgcggtccggcaggaagtaaacaggaagcctcctgcaaacgtcgccaccatcagatactttacataagtctgtttcatgttcgctatttttagatatgccacaaatatacaaaaacatttggctatctggcaaataattcgttactttgcaccgctttcgcgcaatcgctgtcaagagaagagatacttggtatgttgcgttgtaacgatgaaacaatttaataataacaacaatggatttaattaaaattgcagaagaagcatttgctaccggaaaacagcacccgagcttcaaagcaggagacactgtaacagtagcatatcgtattatcgagggtaacaaagaacgtgtacagttgtaccgtggtgttgttatcaaaatcgccggtcacggagacaagaaacgttttactgtacgtaaaatgtcaggaactataggcgtagaaagaattttcccaatcgaatcaccggctatcgatagcatcgaagtgaacaaggtaggtaaagttcgtcgcgctaaattgtactacctgcgcgctcttactggtaagaaagctagaatcaaagaaaaaagagctaactaataagccgaacttttcgattcgaaataaaaaagggaacttcattatgaggttcccttttttattgtatattttctcaaacattctcatgcctatgagaaaaaattctcattgcaatgagaataattcctcaaaggtatgagaatattttctcactccggtgagaataaccctttgtctgaataagccgtacacgtcagaaaggactaaataaaacaaagccccgaaagtcataaactcccgaggcttcattacctttattataataatgaaatgttattctttcaaatctttcagttcccaagccaacgcactggcgcccagtacagcagcatcagaatccttcaattcggaaacgagcagtttagtcttgcctttatagatattcaggatattatcatcaattgatttctgaattggtttcatgatatagtcaccggacttagccaaaccaccaaacaatacaattgcttcagggctggagaatgcaatagcatctgccagtgcttcacccaagatgttacctgtaaagttaaagatttcctgtgccagtttatcaccttgtacagctgcatcatacacatcttttgaagtgatgttttctgcaggaatgttacgaagcaagctagcatccgtacgggcagcaaggaattcgcgggctgtgcgagctacaccggtagccgaacagtaagtttccagacatcccttacggccacaaccgcaaagacgaccatcgcgacgggcgataacgtgtcccaattcacctgcaaaaccgtcatgaccatacaccatctgaccgttgataacgataccgctacccacaccagtacccagtgtaatcatgataaagtctttcataccacgggcagcaccgtaagtcatttcaccgatagcagcagcgtttgcgtcgtttgtcaaagcagtggggatacccagtctttcttcaaacatggcagccaacggaagaattcccttccaaggcaggttcggagcaaattcaatcgttcccgtgtagtagttgccattcggagcaccgataccaatacctctgattttatcaacaccaccattagcaataatcaatggaagcagacttttacacacttcatcagcgtattcttctactgtagggtaaccagatgttttgattgaactgctggcaataatagttccgcgtgcgtctacaattccaaagacggtattcgttccgcctatgtcaatacctactacgtagggtttttccatgtttgaattcatgatacttttatttaaaagggttagttaatcattaagtttactgcacacaaattacgtaaagaagattgagtctacaaaatgttttttgaaaaaagttcaacctgtttgcaacttttcgtatctttcgcacgtctaatagtagaaaattatcagaaaacagaaactaaataaagaaaattgtgatacaactaacgaatatcaacaagacctacaacaacggagcgcctctccatgtacttaaaggtatcaatctcaacattgaacagggagaatttgtttctatcatgggagcatccgggtctgggaaatcaactttactcaacatattgggaatcctcgacaactacgataccggagattattacctgaacaacgtacttatcaagaacttgagcgaaaccaaagctgccgaataccggaaccgtatgatcggatttatcttccagtcattcaatctgatttcctttaaagatgccgtagagaatgtagcacttcctttattttaccagggtataagtcgcaaaaaacgaaatgcgcttgccttggaatatctcgaccgcctgggtttaaaagactgggcacatcacatgccgaacgaaatgagtggcggtcagaaacaacgtgtagccattgcacgagctttaatcacccaaccacaaatcattctggcagatgaaccaacaggagctttggacagcaaaacttccgtagaagtgatgcagattctgaaagatcttcataaactgggaatgacgattgtcgttgtcacccacgaaagtggagtcgccaaccagacagacaagattatacatatcaaagatggaatcatcgaacgtattgaagataatatcgaccatgacgcttctcctttcggaaaagacggtatcatgaaataatctaaaatccaccactatacaaacattatcatgattgacatctggcaagaaatatatagtaccatcaaacgcaacaagctaaggacttttctcacaggatttgccgtggcatggggaatctttatgcttatcgtcctactaggtgcaggtaacggactgatccacgcattcgagcaatcggcttccgaacgtgccatgaactccatcaagatttttccgggatggaccagtaaatcatacgacggactgaaagaaggaagacgggtgcaactggacaataaagacatggatgctaccagtcattatttcccgaatcatgtcatcaaggccggagcaaccgtgtggcagggaggcgtaaatcttagtttcgggcaagaatacgtcagcctgaacctttccggcgtatatcccaatcatacagaggtagaagtcgtgaagcttttcgaaggacgttttatcaatgaaatcgatatcaaggaacgccggaaagtaattgtactccataagaaaacagcagaaatcctttttaacaagactcataccgagccaatcggacagtttgtcaacgccggaaatgtggtttatcaggtagtaggtctttataatgataaaggagatagcggagacagcgatgcctacattccttttaccactctacaaacgatttataataaaggagacaaactgaataacctggtcatgactaccaaaaatctggaaacagtagaggctaatgaggcttttgaagcccattaccgtaaagtattgggagccaaccatcggtttgacccaacggaccacagtgctatctggatatggaaccggtttaccaactatctgcaacagcaaaaaggttcgggcatgctgcgtatcgccatctgggtaatcggcatctttacgttacttagcggaatcgttggagtttccaacatcatgctgattaccgtcaaagaacgtacccgcgagtttggtattcgtaaggctttgggagccaaaccgctttccattctctggttgattattgtagagagtgtcaccatcaccaccatattcggatatatcggcatggtagccggtatcggagtgaccgaatggatgaacagcgctttcggcaatcagaccatggacaccggaatgtggacggaaaccgttttcctgaatccgacagtagatataagaatcgccatacaggctacactcacattaataatagctggtacgttagccggattattccctgcccgaaaagcagtcagcatccgaccgatcgaagcacttagagcagattaagactatgagaatagacatggatacctgtgaggaaatcctcattaccattacaagaaataaaacgagaagcctgctgactgcattcggtgttttctggggaatctttatgctcgttgcccttatcggcggcgggcaaggattggaggacatgatgaaaaagaactttgaaggatttgccaccaattccggtttccttgtctcgcaaagaacgggcgaggcttacaaaggcttccgcaaagggagatggtggaatctggaatctaccgacattgaacgtcttcgctcccaagtgaaagaggtggagatcattactccgtccgtagcccgttggggttccaaagccgtatacgaagataagaaatatgattgtagcgtgaaaggattgtatccggattatctccacattgaatcacaggaaatggcatacggcaggttcatcaatgaggtggatataaaggaagcacgcaaagtatgtgtcatcggaaaacgaatttatgaaagtcttttcaaaccgggagaagacccgtgtggcaaatatgtaagagtagatggcatttattatcaagtgattggcatgtcttcttccgaaggggacatgaatatacagggacgggcttcggaggccgtcactcttccttttactacgatgcagcaaacatataatctgggaggacgaattgatgtgatctgtttcactgcgaagcatggagtcaaagtgtctgaaatacaacccaaaatggaacaggtcattaaagccgcacattatatctccccggatgacaaacaggctgttatgtgcctgaatgccgaagctatgttctctatggtcgataacctgtttaccggtatcaacatacttgtttggatggtaggattgggaactttgctggcaggtgccatcggagtatccaatattatgatggtgaccgttaaagaacgtaccacagaaatcggtatccgccgggcgatcggtgcacggccgaaagatattctgcaacaaattctatcagagagtatggtacttaccaccattgcaggaatgtgtggaatatcctttgccgtcatggtgttgcaacttgtagaaatgggagccaacgctgacggaggggacacccgttttcaagttactttcggactggcaatcggtacttgtgcccttctaatcgcactgggaatgttggcaggtctggcacctgcttaccgggccatggctatcaaaccgattgaggcgattcgggatgaataaggaagtggaacagttatctggatatgtgaggagtttagtttcaatcatcaatcgtaaataataaaattataaataaaatcatgaaaaagtatctgaaaatcacattattggtagtcattgctatcattcttgtcggaacattcgtattcctttatcagaaatccaagcctaaggtaatcacttacgaaacagttagaccggaaatgactgacctccaaaaaactacagtagctaccggaaaggtggaaccgagagacgaaattttaatcaaaccgcaaatttcgggtattatcgacgaagtatataaagaagccggacaagctgtaagaaaaggggaagttattgccaaagtaaaagtaatccctgaactcggacaactgaattctgcagaaagccgtgtgcgcctggcagaaattaatgcaacccaggcagaaacggatttcgcccgtgtgaagaagttgtatgacggtcagttaattagccgggaggaatacgagaaaagtgaagtggctttgaaacaggctcgcgaagagagacagacggccaaagacaatctggaaatcgtaaaagaaggaattaccaaaaacagtgcctctttcagtagcacgatgattcgctctaccattgacgggttaattctggacgtacctgtaaaagctggtaattcggtgattatgagtaacacattcaatgatggaaccacgattgctacggtagccaacatgaacgatatgattttccgcggtaatattgatgaaacagaagtgggacgtatccacgaacaaatgccaatcaagctgaccatcggagctttacaaaatctgactttcaatgccattctggaatatatctctccgaaaggggtagaaaccaatggagccaaccagtttgaaatcaaggctgcgattaccattccggattctgttcagattcgttccggatattcggctaatgcggaaatcgtattacaaaaagccaatcaggtattggcagtgcccgaaagcactgttgaatttaatggtgactctacatttgtgtacatcatgacagattcagtgcccgaacaaaagttccagcgtacacaggtgactgccggtatgagtgatggaatcaagatagaaatcaagaaaggggtaaccgttcaggacaaaatacgtggtgcagagaaaaaagataaataattgaatccgatgaaaataattcgtaaaaccatatcagcccttctgcttgccggagtcggaatcacctccatccaggcacagaacaactcttcgcaagcatggacgctgcggcaatgtatcgactatgccattgagcataatatagaaatccgtcaatcggccaataatgtcgaagcaggcaaagtgagtgtaaacaccactaaatgggcacgccttccgaatttgagcggtagtgccagccaaaactggagttggggccgtactgcttctccgatagacaactcgtatagtgacattaacagcgccaataccagtttcagcttgggaacaaacgtacctatatttaccggtttgcaattgtccaaccaatattcacttgccaaactagatttaaaagctgtcatagaagatttgaataaagccagagaagatattgcaatcaatgtcacttctgcttatttacaggttttattcaatcaagaattaagtaagattgctcataatcaggtcgatttaagcaaagaccagttaaaacgtattcaaggtcttcaaggagtgggtaaggcatcctcttctgaagtggccgaagcacaagcccgtgtcgcacaggatgaaatgactgctgtacaatcagacaatacgtacaaactatccttactggatctcacccaacttttggaattacccacgcctgaaggatttgtactcgaaaaccctaaggaagaattagagttcgaatctctcactccgccggatgacatatatacacaggcacttacttacaaaccaagcattaaggctgcagaatatcgtttgcaaggtagtcttaatagtattcgtattgcccaaagtgcattttatccacaactctctttcagtgccggtctgggaagtaattattatacggttagcggaagatcagagagcagcttcggcagtcagatgaaaaacaatctgaataaatatataggatttaatttgagcgtgccaatcttcaaccgttttgccacaagaaaccgggtacgcacggctcgtttgcaacaaatagatttatccttgaagttggataacagtaaaaaagttctctataaagaaattcagcaagcctggtacaatgctctggcagcagagagtaaatacaactccagtgaagtggcagtaaaagccaacgaagagtctttccgcctgatgagtgagaagttcaataacggcaaggctacctttgtggaatacaatgaagccaaacttaatctgacgaaagctctttcggataagttgcaggcaaaatatgactacctgttccggactaaaattctggatttctacaaaggacaggtcattgaataaaaaagaaataaagttgagtttagtatagtagttccttaaaacatatccgttggttcattcgttattatagaaagaactaacggatatgaagtattttatcgctatagtaattgtaatgattagtaatacatttttaggagttgctaaaccaatgaaaagtcaagcagaaatctattttgcgggaggatgtttctggggaacagaacatttcctgaaacaaattcgaggagtagaaagtactcaggtaggatatgccaacagtaatgttgccaatccgagttatgaacaggtctgttcaggaaaaaccaatgctgccgaaacagtaaaggtggtttatgatccgaaaacggtagatttgaatttactgctcgatctatatttcaagacaatcgatcctaccagcctcaaccggcaaggtaatgaccggggaacgcagtatagaaccggaatttattatgtagataaagaagatctccctgtcatcaagcaggcaattcaattattatccgcacaatataaaactcctatcgtcctagaagtaaagccattgacaaatttctatccggcagagacttaccaccaggactatctggataaaaatccgggtggatactgccatatcaatcctgctttattcgaaatggcacgcaaagcgaatgcgccgaaagctaaagcgtatcaaaaagcggatgatgcaacccttcgtaaggaattgtcggcggaacaatatgccgtaacccaaaagaatgccactgaaccagctttccataatgaatactggaatgagcatcgtcccggcatttatgtggatattactaccggagaacctctgtttgtctctaccgacaagtttgattcaggttgcgggtggccaagcttttcccaaccgattcaaaaaggtctaatcgcagaaaagaaagatacttcgcacggcatgatacgtacggaagtacgcagtaaaaccggagatgctcatttgggacacgtattcacagatgggccgaaagagaaaggtggattacgctattgcatcaatagcgcttcacttcgttttatcccgaaagataaaatgaaagaggaaggttatggagaatatctaccactcgttaaatagatattgaagagttacaaaagctgatcgtaactgttcattagaaaaacagaacggtggattatcccataaggaaatccaccgtttttaatgtagttaaattaaaagagagagaaggagtttcacaactccgatttatttttatctgctggcagtcagcagagttgcttcattagttgccggagtagatacattcatagcccagctagcagcggattcttcaatccatttatcattccacttatagttcatataagcaaccggcatattagcgtcgttcagttcataaacgctcttttcaacagatgcgtcgtaagccctgtgagagtcattccagcgtgcatataccaaagtgatttcattagatgaataagtataatcaattttgaaatacggtatccatttttcagtagaagcatcccatttgaaagcttctttggaagacattctcttctgatcgtcataggtaaaatcatatttcatgtggcgatagagagaaccatcgagtctgtaaatcactttcgatactacaagatcatctactttttcttcattagtaatgaagttattaccctgtgccttcactgttgtattagcgattcctgcaaataccatagcaactaaaacgatcattctgaataatactgtagtcttcataattgtatattttttatttgttcaacattctgtttttgttcttctgtttattagacggattaagcgtctcaaacggttgcaacattctgaagtttttttcatttttcttcgttgtccgcttgcgactatagagatgcaacgagcgtgccaaaacgataactaactaataatcaaggaaatcataaaacagaacggtgtacgaaaacgaacagttgtacgcttaaaagcgaacaactaaccatttttttcgcattttcttctttctactgatgaatataactctaaaaatgggaaaatactccgcttgttgcccgaattattatctacctttgcagcgattatcatatcaagaaaaagaagatggaaacgtccagcaaaaaaagaattatcattctatcggctatcggtatcttgcttaccagccttatttgtctctttgcattccgcaatgtcattttatgccatatcgttgacaaacgaactacacgtgccgaacaaacatacggtctacaaattcattatcaggagttacgaatgaaaggctgcaatgaagtggctttacaaggactttctattgttcccaaccaacgggataccctcctgacattacaatccgtcaatgtaaaactaagtttttgggaattgctaaaaggagaaatcgaagtacggaatgtgcttatgaatggccttgcaatcaacttcatcaagcatgatagcatagctaactacgatttcctgttctttaaacggcaacaagaagcagaaccccaacctgtcatagaaagtgactatgccaaccgtattgaccggatattaaacctcatttacggtttcctgcctgaaaacgggcaactcagtcaaatcaatataaccgaacgtaaagatagtaatttcgttgcagtcaacattccttcttttattattgagaacaatcatttccaatcaaccattcagataaaagaagatacactgcctcaacaactatgggaagccaccggcgaactaaacagaagagactatacattaaaagcatctgtctttgccccggaaaaaagaaaaatctcactaccttatattacccgccgttttggagcagaagtcactttcgacaccctatcttataatatgactaaagataagcgtgcatccaatcaactgctcctcaaaggaaaagcgagagtgaacggacttgacgtatttcataaagccctctctcctgaagtaattcatctcgatcgtggacaactctgttacgagatgaacattagcgggcactcactcgaactggatagcacgaccatcgttgatttcaacaaactccagtttcatccttatttgcgagccgagaaagagaaaggaaactggcatttcactgctgcggtcaacaaatcctggtttccggcagatgatctgttcagctctctccccaaaggattattcagcaatctggaaggcataaaaacaagtggcgagttggcctatcattttctattagatattgattttgcacaactagatagtctcaaactggaatccgaactgaaagagaaagacttccgcatcacaagctatggagccacttcactctccaaaatgtccggcgagttcatttatacagcttatgagaatggaataccggtgcggacttttcctattggtccctcgtgcaaacactttacaccattggatagcatttcacccatcctaagaatgtccgttatgcaaagtgaagatggagcattcttttaccatcgtggtttcctgcccgatgccctacgggaagcattgatttacgacctgcaagtgaaacgctttgcacgtggaggaagcacgatcaccatgcaactcgtaaagaatgtattcctgaaccgtaataagaactttgcacgtaaattggaagaggcattgattgtatggctaatagaaaatgaaagattaacttctaaagaacgcatgtacgaagtatacctgaacattgttgaatggggaccgctcgtttatggcattcaggaagcttctgcttattatttcaataaacgcccttcacaactgaacacggaagaaagtattttcctggcttccattatcccgaagcccaagcatttccgcagctcttttgctgaaggcggacagttaaaagagaatatggaaggctattataagttgatagccaagcggcttgcacagaaaggagtaataagtgaaatcgaggcggatagtatccgccccgatatccaagttacgggcgctgcccggaatagtctagccggtgaaaacccggagtctagttctcctgccgctgaggagtaatgagattgatataaataataaaggaataggttatcttcttgaactgctgctgtttctttcagaggaacgggaagaactttgagtgctattgcttctcgtacttccggaagaagagcgtctttctgtttgtccactagagacattgctccgggtagagctactgctgcttcgagtagaactcgagttaccgctactccggttagaagtggtactgctgctacgactggtagtactaccgctactgcgaccagaatcactgcgactggagctactacgactggaactggaagagctgttatttctctcggaactgttatttctattataggaactactatcgtttcgtttacttgaactttctctcgaactgctacttgtttttccactttcacgattggaggaactggaaccagttgaacttccgcttgttggtctgcgattagagcttgaagaagcggaacctgtttccggacgacgaccagaattacgatcactttctactctattcgtattcccatttttatcaggagcaacattgttaccaggtcttccacttccggatggtgtagatggtctgacagaagtcgaagggcgatctcctccagattccggacggggacgtgttgacgtaccaggtcttgttgtcgttccgggacgagtagaagtatcaggacgagtagaggtacttgggcgagacgtaccatgacgcgttgtcgatgaacccggacgggaagaattacccggacgtgtcggtgcattatgcggacgagtggaagtattcggacggaaccggacagaaccgaaatccgaacgacgataagagtggaatactcgctgatctctcacccgatgcggtgcagaataatggttgaaattagtatatctgccccgataataactcacatggtgaaagtgtggacgataatgtgctccacaataagtacggtaatggtaaggcacaccaaaataaaacaaactgcgattcgggtaattaacataaaccctgaaactccatttccctccggttacatagattggtcgatagaaatactcggcaccgaggaaccggcgatactgtgcatcactcaatacccagcgaagatcgtcattacggatatccaacgcttcataataatcatccaatgcccattcgtaaccacgtgctacgtaatccatgatattacggacagaataaataaagtcgtaattaatttcatacgcatcattatattgctgtgtactcaagctcaattcatatgccatcttatcggtaagaaaacgcgtctccttacgtaccttgctagtgctcattccagccattacggtcatattggcagtcagaccgacagcaaagagtaaaaacagtattcgtttcataattcaatctcctatcatttattattctgatgatattcctcaataaacttacgcatctcatctttatatgcattagaaaataaaatatcgatcaccttattaaaatttcttttatcccttacataaggatacagcttcttcatcatctccacctggtcaggagtatacgaaatctccttcactattttcacacattgatttgaagtgacatcatacgttctcaacatccgatcgacaagcttcttctggtcttcattcataaccgttattttaagcttattgataaattcatcaaactccggatcagtcatcaaacgagcttcttccacttgttcatgattaggaaagacttcaacggtagtgttcacagcaggcggtactacaacggaatgcattggtgcaggtctgccataacctttgaacgtatccatactaaccacctctctatttacaaactgaacgattatcgtcacaggttccgaagtaagtacaggcgtaccgttatcacgatggaattcccattcttccatatcaccgtcaaaacgccggaaatcaggttttcctaaaacggactctacctgagattgagtcattccctgatatatacccatcatctgtttggtagatacatagctggtaaaacagccactgaccaatattcccaacgccaaacacagcataatatgtatctttttcataaccgtatcgtttttagttaatagtatcaacgtttaccgtaccctatgataaaatccttcatcttttccttgctggagctaaatgtcagggtattaatcaccgtaaagaaagcttccttatctacaatccggggatacatgatcttcataatctccatccggtcatcatcgaatgtatatagtttggtcagttggagacattgggcagatgtgaaatcagaaccagccaatgcagcattgagcaacttcatacggtcatctttaaaaggctcattcttcatctctttataaaacgtttggaagagctgatcgttcatcaccctgttgtaaccatatcccggacgatgttctccctgttcgggacggccgggtctttccgggcgcatgttatcacgtccgtctacccatatttctgtcactcctctcccatcaaaataaacgagatctttatataatttttctcctttccatactcgctctcccgcacgggtaaagcgggtggcaaacacttcaacagtataatgtccgggatttaaattggctataaagcaggtagtagtaggtaaacatatctggttccctcccaggtaaacaagaatcggagtattcccgccatcgatacggattccgttaacagactgcgcttgtaaggagagggcagcgaacaggatacagaaacttattataatcttacgcatagcttatctagtttttaattatttatatctttaatctgatagcacaaaaatagggtgaggaaactccctaccccaatgattctctctattcgtatgtagggaaatccctattctgtttaggaatccgccaaagcaatgccatcctcatgcaaggtaatcagacgtttcttatacaagtcgcccactcctttcttaaaggttttcttgctaacaccaaacgtgtcataaatatcttccgcaggacttttatcattcaagttgatccgtcctccatgcgctttgatatagtcgagcagcgttttcgaaaaatcgtcaatcttttcaaaaccgggtttctgaagaatcaggtctaccttaccatcttcacgcacctgtttcacaaaagctttcatctccattcctgtttccaacggacagaatatttcattttcatacagcaaaccgctatacttattatctataatcgctttaaagcccaaatccgtcttctgccagataaggatattcacttctgcttccggagtatattccggcttttctttcgacagataacgttccacctttgctgaagccacaatacgataactctcttcatccaaatgcgcatggaccacatatttccgcccaacctgcattttcatcttctgctcactgaacggaacgaacaggtctttcatcaatccccagttcaggaaagctccgtattgattcacccaggagacttccagacaggcaaactgacctacctgcaccaacggagtcagcgtcgtagcaatcagtctttcatccatatccagataaagaaacacgttcaaaaaatctcctatcttacagtcttcgggcacatagcgggtaggcaacaaaatctcaccttcttccccaccatcgagatatacgccgaaatctacttctttcacgacttcaagctgattgaactttcctaattcgatgctcatattcttatctatttattgtaataagacacaaagataatctattttgaatagatctctcaaacagtcagccataacttttcgttatcgggcaaaactatttgcaatgaacaatctgctttctaatatgttaactttgtagcgacaaaaagaaaaagtaaattattcacctttaaacatataaacttatggaatttctaaccaacgagaaacttacgattgtaggagctgccggaatgatcggctccaatatggcacaaacagccatgatgatgagactcactccgaatatttgcctgtatgatccatttgccccggctctggaaggagtagctgaagaattgtatcactgcggttttgaaggtgtcaaccttacatttacttccgatatcaaagaagcgctgacaggagcttcttacattgtctcttccggtggagctgcccgtaaagcaggtatgacccgcgaagatttgctgaagggaaatgcagaaattgccgctcaattcggtaaagatgttcatcaatattgcccgaacgtaaaacatatcgttgtgatctttaatcctgcagacatcaccggattgattactttgttgtattcaggtttgaaaccctctcaagtttctacactggctgccttggacagcacccgtctgcaaaacgaactggtgaaattcttccatatcccggcttccgacattcagaattgccgtacgtatggtggtcatggcgaacaaatggctgtattcgcatctacaaccaaaataaaaggagagcctttgaccgatttcatcggcactacccgtcttccattggcagattgggaagcactgaaagtacgtgtcatccagggtggtaagcatattatcgacctgcgcggtcgttcttctttccaaagcccggcttatctttctatcgaaatgattgccgctgctatgggtggacaacctttccgctggcctgccggaacgtatgtttctaacagtaagttcgaccatatcatgatggcgatggaaacttcaataactaaagacggcgtcacttataaagaagtagccggaactcctgccgaacaggaagaattggaaaaaagctacgagcatttatgcaaacttcgtgatgaagtgattgaaatggggatcatcccagctattaaagactggcacgcattgaatcccaatattgactaatcaaacaatattagcaaaaagccgaaaaagagatgtattttctctttttcggcttttattccaattacttacatatcacatatcccccccacttagtctataaatctttcaagactccaattcaaatgactatgcaaagttggggataattcgtcaattaaaaaaatagacaagatggggaaagtacctaaactgaagttacaggtactcaaagtgcgaaatatagtgattatcctatccaaattagtaaatggaataaaactgcgcatcgaagtttataaaatatctgtcatttttgagaagtacattcggaacaaactccttttagtacatagtttatactatgcaaagtaaatcctttaggcaaatcaatcaccgggatatgtgtaccttccaggcagaatgtacgatgacatttctcacaataaaaatgcgaatgtaaatcctgtaccacacaattgcaggagttgtcgcaaacggcatacttcaacgagccgctcccatcgtctatgctatgtatgaggtgatgagacaagaaaagagcgattgttcgggatatagtcgatttatcgactgtatcaagcagtgtttccaaatcgagcaatgacaccgcacgctctgcctgcatcatcgcttttatcaccagaagccttatggcagttggcttgatacctcttctatccaacttatccaaataaatatcttcttccatctttctcctattttatcattttctgtattctgacagcattcataatggcaagtagcgcaacacccacatctgcaaagacagcttcccaaagagtagcaattccaccggctcccaaaatcaatacaagtaatttcactccaaatgccagtgatacattctgccaaataattcttcgtgtcagttttcctactttgatagcttcggctaccttcgacggctggtctgtctgtatcacgacatcggctgtttcaatagccgcatcactacccagtcctcccatagcaatgccaacatgacttagagcgagcaccggtgcatcgttcattccatcaccgacaaacgcgatccggtttgcctcatcctgccgcagctcttccagatgattcacttttccttccggcaacaggtcaccataagctttcgatataccgagcttttctgcaaagttagtaacaatactctgtttatcaccggatagtatctggatgttttcaatatttaaagcttttaaattgtcaatagctacctttgcgtcctctttcagggcatcagccagcagcagataacctgcataacggtttccaacagcacagaccacgatggtatccgttatttccagcagttcttttggataggatatatcaaacttagacagtaaccggcaattaccgaccagaaccatagccccgtctatcgttgcttccaaaccatagccggcaaattcttttgtaccggtaacagctacacattcaatgttttgttctttcgcataattcacaacagccttggcaatcggatgagtactatcactttctaccgaagcaaccagtttcactaattcttcttccgaaacctcgcctgcacttttacaggcctgtacttcaaaggttccttttgtcaaggttccagttttatcgaataccactgtattgatcttagtgatagcatccagataattaccacccttgaataaaattcccaaccgggatgccgctccaattcccccaaagtagcccaacggaatactaaccaccaacgcacagggacacgaaatcaccagaaagaccaaagctctgtatagccaatcattaaatgcaaatacaaatggaggattaataagtgaataaacaaatggacacaaaacaattaacactgcaagcgctataacaataggtgtataaatgcgcgcaaacttacgaataaacaattcagccggagccttacgttcggaagcattctgaacaagctccaatattcgggcaagtgcactcttatcaaaaggtctcgttacctcgagccggataaccttatcggttacaatcattccggcaagtacttcttcacctttccgaatattacgaggaacgctttcacctgttaatgcggctgtattgaaggcagccacttcattctgcatagttccatccaatggcacccgttcgcctgcctttatttctatgatttcaccgacttttatctttttagggctttcaataacaagattgccttcccggagcactaatgctttctcgggtcttacatccaataaggctccaatattacgtttggctttatctaccgctttatcctgaaacagttctcctactgtatagaataacatcacggctactccttccggatattcaccaatatagaaagctcccaaagtagctataatcattagagtgaactcactgaaatagtctttttccctgatactttcccaggcttctttcatcactggaattcctaccggaagataggccacgatataccatatcaaggcaacagatccttcacggaagaatgctaaatcgagagcattcataattattccacttgtcagaagcaggagagagaatatcactttcccatattcatggaataccgaaacctttgcatcaacctttttttctgctgcgcatgaatgagcgccacaactacaatgtcccataactttcattatttagttgatgcaaaggtagcaaatgatttatgcaacaaagttgcaaaatcggttttagaacatatatcccaacgagatcatcaggtttctgttcttcattcctacttctttgattacctcaataagtccgaaatcatagcttatggcaacttgatatttcttactgaactcaaccccggcttttagtccaagaccgaagtcgaatcgttttagaccatcgtctccaaatatatcttcggacatcgagttacctcctaattccgcaatatctgcaatatcaccgtccactttcaattttgcttttccaaacagcccaacagccatataaggacctacactaccaaataatgaaaaatcatcattgacggcatatttatacccgacacgtaccggcacttccagatagtatggattaaattttatgctcgcaagtgatcctccatcaattttagcacctttcaatgtaaacaatgcagcgaagtccatataggcaccactaccattcgcatcctgcgacaatcccaactctgctttaacacctgcgtgaaaacctatcctgctatcaaaacctgtaatggtgtatttactaacattcatacctgccatcacaccccatttcagattgtcttgagcattgatactcaccgcacttatcgctactaaagcgaataataataaggcctttttcatacgaataaataatttaattattgtttagaaattatgtgaggcaaaaataacaataattcgcataactccgagagatttagtaaaaatataaaaaataaacgatatgaatcttatgaggtatagtcatagcaagagaaccggactatttcaaacgattttacgagatatagaacaaaaacactctgtacagagaaaaaacaaagaatgaaagactgtataacttaattaattgttatctttgcacaatcagtcgtagcgcgactgtattgtttgttttaagaaaaaaagcgtttagctgatttctgtgccagagaaaagtcgaaaattccaaacacacagagaagcagatagatgctccttgcaatatgcggggagtgtttcctgtttgtgtgtttagggcttcgactccctctctggcggataggcaaatgctctccgctttttttgtgcctataaatttgcaatagatacaaacgacaaattagtaataatcacaaaggcaagtcaattcgggtggagcggcacccgaacgactacagagtcgaaaacgtaacatttagatgttactacttgcctttgaaaatataagagacagaggctagctacacctgcaaggggaacaaatggattcatccaggagttcccctctatttttgtgaagatgtgtactattggaaagacagatattaggtctacatataaatttgatgattcttattgtcaaccaaagcttttcccaaataatataatgattatcatcggtttacatgctgacaataagccatggcaatagcctgacaataaaaaaattagaacttttattgtcagcctgttctttgatccctttggggcaaggttatgggattcattccaatatgtcgatatactctaacttaattcccagcttgatccatgttataaactactgaagactatcattgtctacagtaacaataccatcgacataaaaaacacatacgctttataaaatgagtatgcccctgttaaatgaatgctacataaccggtatctttcacttaccaagcaggtattgttccattaaagtgtcggtgttgttaactccccacggccgtgacgagatcttcccacggctgtggtaggaattcatcacggctgtgggaagaagtcaccacggccgtggagaactaaagataccagtgctttagtggaacaatactgataccctagaggaactatactggcgtgttaacggaactatataggtatattaatgaaaagatatcactttggaaagctgttataaaaatgcggcattacttcgaaacatgttcataaagctattgtttatcaggttattaaaaggatcataagagataaaaataaggctgacagtaaaagtagatatattttattatcagcctattatcagcatctattgtcaggtgatatagcattgatattcatatacttaaatactattctgacagtttgacaataaaacaggtacaaatcaatagaaacgatcataaagtttttaattgggaaaggcaaagaatttataaaaagaaagaaaaagtttgctgttcccttcagaataaacatctttgtaaccgtggttacagtaacctcagttactaatataattcactgactatgaggttttataatagagaggaagaactgaaaaaactgaaagagctaaaatgaaaaaagaccttctccttacagttttattcctctcactaatatatttacccagcgatctaaagctctttccatcaaatttaacgaagaaccgaataacacaaaagcatcctatagcttacaacatacatatattcatctaatattcaaatatttatattaatagagtatattccacccaagacaatatatcaaaataatctttcatatacaatataaatctgcaacgtataaaagtaatttaatgacaggataaaaaagaaaagattaagttttatcatttttcacagaacaaacatgaccgtaacaaagaaaacatactgcaataaaagccttttacaattcttttactatcatagagttaggttacgggaaaatctccggataaaccttgtttcgagaagtttttttgttacttttgccgcaaactaatatatttcagtgcaacgggaatcttattataatatgaaagacatcaccttatggaacatcatgttgaaaggtgacacaaagccattagaggtattgtataagagacattacgagcttctattgaattttggactcaaatatgtttcagatgaagaatttgttaaagattgcattcaggatcttttcgtgaaactttgcagcagcacccgtttgtctcccaccgattatgtgcgttcctatctgctgacttctttgaaaaaccttatattcgataaactttcatctttaaaatccaccgaagatatcaatgcgcttcccttcgacttaacgatagaagacacctcactggaagtcttatttaaggataatgatgaggatatacaaatgattaaaaatctgcaagaggcttataaacaactgtccgagaatcaacggatggcgatttatcttcgttacattaaaggcttatcctatagagaagttgcagctgtcctggagattaatcctcaatctgccatgaatttagtatcccgcacactgacgagccttcgctctaaaatgaccttgaaagaatatctctttttccttcctttttttctttcttaaatgctactatttcctttgtccggttcacccaatttgctgaagaaatctttttctgcaaaataatgaaagaaaagtgagtagactttttcttttctcccgttttaaatataaaagcaaaaaatggaaggcaagaaagcaaatatacatcaggtgatacgcaaagtaattctacatgttcggaaacaggagagaaatgtctcaacgaccgagctggatgaatcatggagacttatcgaaaaacaaatccatgcaaccaaaaagaaaaagttgcatcaacgattactttatgcggcaacttattcatcagctgccgcaatcctgctatgtatgttttggctgggtaaacagttcatctcttattaccatgcagatgacagcgcattagtcgatttcgcattgaaaatgcaggcagccccattacaagaagatattctattattgataccgggcgaaaagaacatagaagtaagtgatacggatgcaaatatcatttattctcaaaatggcatagtggtggtcaactccgatacagtcaatcagattcaggcacaaaagaaaaagcccgagttcaaccaactgataactcctaaaggaaaaagaactcaattgaccctatcagacggaactcatctatgggtaaattcaggaacacgtgttatctatcccactcattttgaaaaagagcatcgtgaaatctatgttgagggagaagttttcctggatgtataccgcaatgaaaaagccccctttatagtgagaacgaaagactttcaggtgcaggtattaggaacttcattcaacgtatcggcatattcattggagaaaacgtcgtcggtggtgctggttaaaggaagcgtgaatataaaaaatcacaatcgtcaacaggtaaaactcactccgggacaactggttaatattcatagcaatcaactggatgctcctcaaaatgtagatgttgagccttacatctgttggataaagaatattttaatgtacacggatgatcctttggataaggtgtttagaaaattaaatttatactacggcaaagaattcgtgttagatccggaagttgaaagcatgcaggtttccggaaagctggatttaaaagataaacttgaagacgtcttacatactatatcttattctgcacccatagaatataaagaagtgggtgataaaatatatgtgaggaagaaataagtatagatcatttattgttaaacctttatacgtaatattatgagaaacaaaagtccttaaaaagaaggctgaatgataattgcagtatcatccagccgaaaaatcaaacaacatttaattgtttaatttcttaaaaacgttgtaaatatatgaaaaataccagtagcacatttcttacaagggtgagaatggctcgcatattatttctttttagtgtttgttttctttctttacactcttatgcagcgaacataggagcgtatgctcaagagaaaaatttaacgattgagacgcggaataaaaccgtcaaagaagttcttgattacatagagaagaacagcgaatttatctttttctactataacaaagccattgacacgaaacgtatcgttagtttgtctgtaaaggaccaaccgataaccgttattctcgatcagttatttaagaatacagatgtccggtatgaaattaaagaccggcagatttctctgaaaagagaagagttgcctacacagcaacgtccgcaggattcgaaacaacaaaagcgcaaattggtaggaaccgttacggatgccttttccagcgatcctttggtgggggtcagtatttccgtaaaagattccccgggaacagggacaattacagacttggatggtaagttttcaatagaggtttcaaataatacagagttaacattttcttatatcggatacaagcagcaggtattgagtgtaggcgatttgggagttttgaaagtgaaaatgcaatcggacaacgaggtgctggatgaagtggtggtggtaggagccggcacacagaaaaaagtatccgtaaccggtgctatttctactgtaaaaggtgtagaattgcgtgcaccgagttcttcactgaccaataatcttacaggaaagctggcaggtgtggtatcgatgacaaccagtggagaaccgggttccgtatccgatttctatatcaggggaatcggaacattcgggggacgtgcaacacctttaattctgatggacgatatcgaaatttcgagtggcgaccttaataatatccctaccgaatcgatcgccagcttttcaatcttgaaggatgcatcggcaactgctatttatggcgctcgcggtgctaatggagtgctgcttatcaaaacgaaagacggtatggaaaacacgcgggcacagataaatatcacgttcgaaaattcatttctaagaccggcaaacacgctgaagttcgtcaatggccctacgtttatgaatatgtacaatgaagccttggtgactcgtactccaagcgcaacacccaaatattcggatgacgtcatagaatatacaaggagcggaatcaatccgtatgtttatccgaacgtggattggtatgacctgcttttcaaaaattctaccatgaaccaacgggcaaacattaatgtacagggaggtagttcgaaggttacctattacatgagtttgcaagcaaatcatgatagcggtatgctcaactcccccaagcgttactcttttgacacgaacatcaacagatgggagtacattttccaaagtaacatatcctataagatgactccgacaaccactgtcgagctacgcatgaacgaccagataggatatgccaaaggaccgtctttttcaacttccgacctgttctatcttacctacaataccaatccggtggcatttccggcatcttttccggcagaagaaggtgacaagcatatacgtttcggaggggcaatgcttagtggaaattcgatgtataacaacccttatgcatatatgataaataatttcagaggatccaatcataataccatcaacacctctgttcgtattaatcagaactttgattttgtgacaaagggactttccgcctctattctggttaactggaaaaactattcaaactcatcttataccaaatcacttgccccctattactatcgcgtacaggatggcagttggaatgtcgattcgcccgacctttatgcattggagcaactgacttcgggatctgaatatatatcccagtcggatatagagcgctaccaggacaataccttttatatggacggacgcatcaattacagcaggcagttcggccgacatgccgtatcgggaatgttgatgtatatgatgcgtgaatacagatccagcgtattacccaaccgcaaccaaggattatctgcccgtatcacctacgattacaaccagaaatatctggccgaaataaattgcggttataacggaacggaacgtctggcagaaggagaacgattcgagttatttcctgccatatctttaggctgggttatcagtaacgaggatttctggactccactgcgttcaattgtgtctttcctcaagctccggggatcttatggactggtaggcagcgatgatacgggaaaaagtgcgggagctgcccactttctctatataaatgatataaagctcgacgatttgggttatggaaccggacctgatggaagtgttgtcgccaaaggacccagcgtttcatattatgctgtcagaaatgcacattgggaaagagtgaaaaagttcgatatcggtatagacatgaatctattcaaccagctcaatattgttttcgactattttcatgacaaacgagatcgcatccttctcaaacgaggttcttttcctagactattaggatacgctaatgctgtgccatggagtaacattggtaaagtagacaatcgaggtatcgagctggctgtcaattggcgaaagaaaatcaccaatgatttaaatatggacctgcgtttcaatttgacatataataagaataaatacatctacaaagatgaaccggattacccttacgtgtggcagtcggaaactggtaaacccttgagtaacacgataggatacattgccgaagggttattcaaagaccaggcggatatagaaatgagcccttcgcaggatgaattgggaagtacggtaatgccaggtgatatcaaatatcgcgatgtaaacggtgatggcaaaataaattcaaaagatcaggttatgatttcgcaatatggcaatgtgccgcgcattcagtatggaattgggctagacatgacatataaatctttcgattttggaatgtttttcaatggttctgcccaacggacaatcatggtatcaggcattatgccatttcgcggtgatgcttcaaccggtgatcgaaacgtgatgcagtttatcgccaacgactactggagcgaagctaatccgaatccggatgcgagatttccacgattaggtattactgacagtcaagtggcaaacaactctgtcaacagcacctactggatgcacaacggacgttttatccgctttaaaacccttgaactcggatatagttttccgtactgccgtgtttatatcaatggggataatctggctgtgtggagtccttttaaagagtgggatccggaattgtcatggaatgcgtatcctcttcaacggactatcaatattggagtgcagctaaaattctaagttctatataaccaaaatataaaatatgaaaaccattaagatcatatcacaattcatactaagtgtaactgccgcatgttgcatggcttcttgcaactatctggacgttgtcccggatgaaacagccgacttgcccgacgcaatgaaagacagagcttccacattgggtttccttcattcatgctatacttatttcgagtggttttacacagtcgaaaactcattcatcaactcgaccgatgaatatgcccgccccttactatgggctgacgacggacagaaagcggcatggaaccagctttctccttccagtcaaaccgccccgtggaatagttgttacgatggaataggacgatgtcatctattcatggatcagcttgacaagagcaatccgacgggagtaaccgagagcgataaaagacgttggaaagccgaagctttgttttgtcgggcactctatcattttatgttactagagtcatacggacctataccattagtgactgaacattacaatcaaaaccttgacaaaaaggattttccgggcagatcgcatttcgatgtatgtgtagactccatagctgaatggtttgaccgggctgccttcgaattgccgccaacagtacagaacagcgaactgggacgtgctacttcaacagcttgcaaagccttaaaagcgcgattgttggtttatgccgcctcccccctgtggaatggctcattcccttattcaaactggaagaacactaactttgaaactccgggatatggaaaggagttagtcagcagaacatacgatgaaaacaaatggaaacgcgccctgacagcttgcaacgaggctcttgattgggcactgactcaaggtaaccgcaaactgttcgaccttgccacttccaccagtatcagaataaaccaaggagttccattgcctaatatagagggggttgatgaccagtttaaagagtcggtaatgctcatgcgttacctcaatacgacacgtgagactgatggcaataaagaagtaatctttgccatcggaagcggtgacaactatggcatctattcacaaatacctcatggcgtcaccacttacaacggctctcctgtaggaggatggggaggtattgctgttttcttgaactctgttgaaagattttatacaaagaatggaaaattgccccaatacgatcattcttttcccgataaatcggactggtttgaatcggctggtttgtccaatccggatatcataaaactcaatgtcaatcgtgaaccgcgtttttatgcatgggtttgttacgatggaggtgaatatagttcgttcatagccgatggctcaccactgatacttgaagcgcgtaactcgcaaaaacatgggtacaaccctgacagatataatagagataataatgcaaccggatatttctccaaaaagagaatacaacctaacttccaatggcgttctcaagataatggcaataattacgctcatactccactggcagtcatacgtttggcggaattatacctcaatctggcggaatgtcatgctgcattgaacaacaaacaagatgtcttggacaacctgaacattgtccgtaatcgtgcaggtattcccgatttagaattatctgacataaactctgatatgagtttaatggattgggtgcgcagtgaacgttatgccgaactatggtttgaaggacaccgttattttgatgcccggcgttggacaattgctccggaggtattcaaagccggtgtccgtgaaggtcttaatgccatcgcaaaaaaagatccatcgttccgtgagtttaaccaaagagtaaaggtggaccaaccttttatgtggaccaacaaaatgtatcttcttccgatcaatgactcggagatatacagcaatccccaactagtacagtcgcccgaatattaatttagaattaccagaattatgaaaacgatattattgaaattaattttaatacttggtgtatgccagattgtatattcatgtagcaacgaatattcgaatgataagttattccctgaagaatatcacaaaatattgtatttcaagaacgagggcaagcatatatttagttggcaggcttctgaaaatacagtcgaagagcctcttctggttattaaggcaggaagtgacccgtctttgactgcaacggttaacgtgcgtgcattgacacaacaggaaatcgatgaaaattatagccagcccgaaaatcaaagttacaagacaataacgcctgatgcatattcatttaaagacagagttcacgaactaacgtttgcaactaacgagacgtcgaaatatctttatctgaattttgatgtagctagaatatatcagttaatcaaatcggcacctgaatccaaacttgttttggcactccaattggaaagtacagaagagggtattgtgaatgttgaaatgaaccaggtcttatatgtttttgatataaacgggcagcaagtggaatggggaaaaaaagatatacagattgaaagtgcgacatatagttcaatgagtgtaaaactcaaagccgaaattgcagataatatatccaatttctcttgcggactcgatttctcacaaaacgcgcaactggtgtctgcatataatgattttcattcaaccaattatgaaacgcttcccgcaggagcctaccatgtgaatgatttttcttttgcaaatggcaatgatgatgctacaacgacattgacagtagcaagttcaacattgcaaaaagataagcactatcttcttccgttgaagtttgcatccccctcgtccccacaaatagaggtatcagacgagatttattacctgactgttgtggtacctgctgatccgcaagtcattcccgacaacagggaatggaaaatattgctatgcaacagcgaccaaaagatggagaacccatcatcaacggatggggataatatcggagccggagccatcatagatggaattttcgacaatcactggcattcgagttattggggaaaagatgtcaatggattcaataataaagacgactatcactatggcttcactgattatcattgttttgatggaatgagaacacctatcacaattgtcatagatatgaagaattcaatagaagtaagcgatatcggactgactcaacgaagagataacgcgaacattaagaagatagatttctatgtttcggacgatcctcaatttttattcaaaacgattgccgatggaggaacatctgctgattactcggctgtggcactgaataactggacgcttctcttttctaaagagaacactccacgacagaatgaaaccatctggttcggtgacagtgagacgataacgccacaaaagggacgattcctgaaaattgtaatttccagtgcatacaacgctccctatggcctcaacggtgtggattacatcgttgtcggtatggccgaattgcaagtaaaacaactttctacaatgattggaaaaataattcaataagatgaaacacagatttaaatttttaacacttttgctggtattgcttacaataccagcaggtatctttgccagagaaagcaaatttacgaagcgaggcagcggaccattgttttggaatatgtaccaatacaatttccggtatggaacatcgatgcctgaagatgtttggaaaaagaatatcgactggcttgccgaggagtttttaccttatggatatgatatggcagctactgacggttggttatttaacctcaattctatagatcaatatggttatctgaccaaatatgacagttcgtggacatacgggctgaagtattggggcgattatctcaaaagtaaaggcatgagattcggattctatttcaacccgttatggatacctaaagctgcctatgtgcagaataataatatcaaaggaacctccattccgataactgatgtggtgggcactacaaagtttgaagatcatctgtactggatagatactgacaaaccaggagcggaacagtgggtgaaaggctgtatcagaacaatgatagatcagggaatagagttgctgaagatagactttcttggttactatgaacgggattacggaaccaatagatacatcaaggcattgaaatggatggctgaagaagccggagatgaaatgttgcttagttactctgttcctaattgtcgcaacgatgcccgcaacgagattatttatgcggatatgattcgcataagtagtgactgtgacggtggaggatggtggtttatcagcgacaaagagcgcggacagattaacgaaagcggacaaggtgataaataccgaagtgcttttgatggattaatcggatgggctgatattatcggggtgaaaggacaaactataatggatcccgattttgttcaactcaacacattggcaagcgatgccgaaagagagtttcatatctcaatgttgctggttagcggttctccaattggtatcaccgatcagtataatacgattggtgattgcgccaaattctacaaaaacacagagatactggaattgaataaactcggttttgtaggtaagccacttagtaccagtatatgggataaacaaaacagttcgagatggataggacaacttcctgatggagattggattgtcgggctgttcaatagagaatcgacagtgcttgaatatggtattgattttgaaaaggaactgggaattaaaggtggaaaggtgaagaatgtacgtgatttgtggctgcatcaggatttaggcgcaatgtcgggccgatactcggtgcgacttgaaccacattcatgtaaggttttacgtatcaaacccaattcaaagagatacaaagcggctgttgcctcactcaaaaatggtgcagttataaatagataatgattatgaaaggataccctcaatatttatggtttgtagttctcgccctattactggtttgcacaggttgtagcaatgagggtgagacagaagacgataacaaccagcatgttaaagtcgaaggcttttatgtcaaagggcttgaaaacgtaaatgcacgtgttgagtttgatgtagaggttgatgccgccggtatatatacattgcatgtcatgggctacaactattccaaagggacagctacgtgtagcttatatgtcaacggtcaaaaacaatcgcaacttggatttcaggaacaatccaactggagcgaaaaagtagttcaggtatcgttggcagccggcataaatcaaatagcctttcaacgggacgctggtgataacggacagttttatctcgattacatagaaatagactaatagtatgtttaccagaaagatgaaaatcgttttattgctttttgtattgttctgccttgcagataatgctaatgctacacctcgctggcgtatcctggatagtggagcgatagaatggcagatagacggtcggctcccccattatgaccatattgaaatgagcggtttaaaggtttcagcggtattacgttatggcgtaaacggcgatgggcaatttgtgatggaacgttcaatgatatggcctatgttgcggacgatacccaacaatacacatgcaagcctgatgcaacgatttgcaattgattacgcttctttgttgttagttaatggtatggctctcaacaatgaaaaagtgaaatcgatatgtatcgacggacgactcacggtagtaagcctttttgctattggataccagaatacaggtacggcacgcaatagagagccagtacctgtagtcgaacttacgagatcattctttccttcaacagacaaaccgatgctttgtgaacgttatacggtcaagaatatctcatcaaaacctatttctgttattgtaccttttcaaaaagccgtttacaaaaccgatcctgtaaaaggagtggatggatcatacactatagttacctctatacaaaataaggaagactgtttatacactattgctcctaaagaatcattgactttcgacgcttctgttcaggcttataaaaaaggagagaaagaattgatagtcgatatagcagacgaggaacataaacgaatggcctttgtcgacaagatatggaacaatcttagctttgtctcccctgatccggtagtaaatacagcatttgcttttgctaaagtaagagcagcagagagtatctttgctaccggaggaggattcatgcacagtcctggaggagaatcatattatgcagctgtttgggcgaatgaccaagcggagtatgccaatcctttctttccctttttgggttatgatatcggaaacgcgtccgcattaaactcattcaggctttttgcccgcttcatgaattctgattacaaacccatacccagctctatcattgccgaggggaaggatacctggaacggggctggcgatcgtggcgatgcagcgatgatagcttatggggccgcccgttatgcactagccaaagcagataaaaaggaagcacaagagttatggcccttgattgagtggtgtctggaatactgcaaaagaaaaataaatgcttccggaattgtgacttcagatgctgatgagcttgaaggacgctttccagtaggtaacgcaaacctttgtacatcaagtttgtattatgacgctctggtatcggcaagctatcttgccaaagaacttggcaagcagtcttctgtttcaaaagaatatgcccggcaggcgaaagtattaaaaaataatataaacaattattttggtagccgtatagaagggttcgacagttaccgctattatgaaggcaatgatattttacgttcatggatagctatccctctgacagtcgggatctttgaaaagaagacaggaaccgtcgaagcattattctctccccgtttgtggagcaaagacggcttattgacacaagccggaacagatactttctgggacagatctactctttacgctctacgaggagtgtatagcgcaggagcaagagagagggcaatggaacacatggcatattactcacagcaacgcctgcttggggaacatgttccatatcctatcgaggcctggcccgaaggaaaccaacggcatttgtcagccgaaagtgctttgtattgccgtatagtaaccgaaggtctttttggtattcgtccgacaggatttaattcattctcactctgtccacaactacctgataaatggaattcgatgagattgaattatgtttcggcatttgcattttcgccgtttgatataatcgttgaacgacaaggaaataaaataaagacctatgtgctacgtaatggaaagcccgtgaaaacatatcacacagagaatgggaaagatataaatattaccttctaaaatggcttttatttagatatggactatgcggattcctactcctgattttaactaaatccgtattcatccgtgtaatccatatctaatcaatatcattgttggttttcttctcggtctatccgaataaactccagaagtcgttctaccgcttcttcttcaggaatatttttctccacacacaccttgcctttatagagactgattttcccccgtcctgctcctacatagccgtagtctgcatctgccatctcaccgggaccattcacgatacaccccatgatgccaatcttcagccctttcaaatgtgaagtggctgccttaatacgggcaatagtcttttccaagtcgtaaagtgtacggccgcaaccgggacaagatatatattctgttttggaggtacgggtacgtccggcctgcaagattccgaaagcagtagcatcaacgacggcatggctcaagttaccctgattgaacaggaagatgccatcacaaagaccgtcaaaaatcaaggctcccatatcgactgcggactttatctgcaaattctccgcatcatcttccgaataatgctggaagaagacaaccggattttgcaaaccttccgtcattagttgatgtaccagtgcacggtgctcgcccaaacggttcggatgattgctttgggaaacaatcactacttccggatgatgtttcaggcaggctatcacttcgtccgtttgtgccatgtagggcataaacaggaatttaagctctgtattgcattctcccattaacggcagctgtgcatgattgaatgcaggccaggttccgtcttctccctgccatacatccgcatcaagaatatattctactccgtcttcccgttgatcaggcaaggttcttccggcataaatatagtccggtgtgaattgcgggtttatctctgtcttcccatccatacggtcggcaataaccacaggtacatgttcacctccgatattacggacggcttttgtcttgcgacgttcgggagacagataattgaattccggtgcttccaatcccgggatataaggatgatcctgcctcaacagaacataatccaccagtttacgggccaccgggatttcagcttcaggagcttcgctcaaagagacccgaatggtatctcccaatccgtcactcaacagcgcaccgatgccaagggcggacttgatacgtccgtcttctccatctccggcttctgtcaccccgaggtggagcgggaaagtcatcccctctttttccatgacgtccaccaacagacgaacagtcttcaccattaccactgtattggaggctttgatggaaatcactacatctgtgaagtcctccactacacagatacgaaggaattccatacaggattccaccattccttcgggagtatcgccataacgggacatgatacgatcggacagagagccatgatttactccgatccggatagccgtgtgattctctttacagatattcaggaacgggacaaaccggtcatggattttctgtatttcctgcgcatactcctcgtctgtatattccagtttcttaaaagtacgagcagcatctacataatttcccggattgattcgcaccttttccgcatattgagcagccacgtctgccactttcggattgaaatgcacatcagcaaccaacggaaccatatatccctggctacgcagtccgatattaatgttcatcagattttcggcttctttgatgccctgggttgtgaggcgtacatactctccacctgcatcaacaatacgtttcgcctgttccacacaagcctgtgtatcctgtgtagacgtgtttgtcatcgactggacacgaatagaattggggccgcccaacggcacagccccaatatttacttctgtggtttctcttcgaaaataattgaatagatccattagttcgttttatattcaaacttcacttctttcagttcttcgtttgcttttacgattttctttttcagtccttccttgtaagcagcaaaagcttctgccagtttctcatcgctcaatgccagcatctggatggcaaggatagcggcattcatcgctccattgatggcaaccgttgctacaggaatgcccggaggcatctgaatgatagaataaagtgcatccacaccatcgagcacggaaccttttacaggtactccgatcaccggcaatgtagtgttagccgcaattacaccgggaagggcggcagccattccagcagcagcgataattactttaatgccacggttgcgggcattcttcgcaaactcttccacagcttcgggcgtgcggtgagcagaaagagcgttcatttcgaatggtacatgcatatcattcagtagctgtgcagccttctccataacaggaaggtcagacgtgctgcccatgataatacttacaattggagtcattttaatttacgattttacgatttacaatttacgatttaaagtgtacagtaaaggttatccgtttatcacggctttataggcttcggcatccagcagatcttctacagcttttaaatcagccggtttcactttaatcaaccaaccttcgccatagggatctttatttaccagttccgggttttcttccaatgcttcattttgttcgagcacctcacctgctatcggcaggaaaaggtcggaaatagttttcactacttcaatcgttccgaaagtttcaccggcttccaacgtttcaccaacagtcgggatatctacgaacacaatatcgcccaattgttcctgtgcataatcggtgataccaacgtatgcaatgtctccgtcaacgcgaatccattcgtgttcgttcgtgtacttcaaattctgtggaaagttcataatgattagtttttaggatttatactgttttaaaataaaaatactcgaaataagatgttactcaccggatgaagtaccaaaagggcacatatcagaccgacagcaaaaccggaaagcacctcacccagtgtgtgatgtcccagaacaatgcgtgcagaacccaatataccggcaatcaaaataaacaggcatagccatccgaccggattgtaaccgaacaaggcactgaaagaaatcaagcctccgatcaccccgcccattcctgccatgtgttcgctcaacttccatttcaggtttactgcaatgcaaatgatagacactaccagggaagcaagaatgataccagtcatataccacgggatattcagcctacgcatcatcagcaggcagaacacatacgagataatggtcagtagaataggtacataacgcttcttacgttcactcaactcctgacgggcaaacccattgattttacgaaacaagaaaattgtaatagtaggtgtcagtatggtgaagcagtaaacgattcccaacactatcaacttatattgtatcggcatgatacgaagataagaaaacaggaataacaccagaaacgataaaaacggaatagaaaatggagtaaagaccatcgaagtgactctcgccacctgcaacatcgtcttatccgctatgatatgttctctctctctgtccactcttctttgattactagttactaattataaattacaattctcattcttcattgtcaattatccattatttccgcagtctcgccacgggaatattcagttgttgacggtatttggctactgtcctgcgggcaatgggataacctttctcctttaatatatccgccaattcatcatcggtcaggggtttcttcttgtcctcgccttcaatacactctttcaggatcttacgaatctcacggacagacatctcttcgccatcttctgtggtatatccgtcactgaaaaagtatttgagcggatagataccgtaattcgtctgtacatatttactgttactcacacgggagattgtcgaaatatccaatcccgtacgttccgccacgtctttcagaatcatcggtttcaatagcgattcatctccttccaagaagaaaggacgttgcaggtcgataatcgcctgcatggtaaccatcaaggtattctgacgctgacggacagcatcgataaatccttgtgccgcatccattttctgtttcagaaacatcatcgcttctttagattccttagactggttagccctgttttttgtatgctcctccaccatttccgtgaagtcacgactcatacggagttcgggaacattgcggttattgagacttacattgatggttccgtcatcatacgtttccacaataaagtcaggaactatttgttggagatttctgccaattgcttctcctaaagaagcacccggacgtggattcagtttggttatttcagtaatggtttcctggaaagtctcttcatcaatatccagtttctttataatcttctcccaatgtttacgggtgaattcttcgtaacattctctgataatcctttcttccagattcaagataggactgggagttttctcttcttcttttttccggcgaatctgtatcaacagacattcctgaagactacgcgcaccgatacctgccggatcgaagtcctgtaagatgttcaatgcttcttccagttcttcttcggtcgattcgataccggcataaatcgccagttcgtcgcagatactttccaaagatttgcgaagcaatccgtcatcatccaatgaaccgatcaggtattccaccaagtcacactggtgctctgtcaggttgcgttcacgcaactgttctttcaggatttcataaaaagaggtggagtcggaaaatggaatatcctccgcttgttcatctttcgaacggttgttctcttgcaatttataatcgggaatatcgtcttctgtcagatagtcactcaaagaatcatagtcattggcatcgctatccatgccatcctctgcattctcggtatcggaatattcattatccgtagcattctcttctttaccttcttcaagtgccggattttcaagcagttcagcatggatacggtcttccaactctactgcgggaagctccaacagtttcacgaccagaatctgctggggcgagagcgtctgtacctgctgttgcgcctgagattgtatttgacgggaaccttgtgccatattcgtttttgctttctactgtttctcgctacaaaagtaactttttaacgagagattacacagattagggagataatttttaatcctataacacaaaattcgttatctttgttgcacgaacttaaaaactaggacaatatgtttgccaaagaaacgtatatgcagcggagagccctgctaaaaaagaacttaggctccggagtgttgttatttctcggaaatgacgagtgcggactgaattacgaagataacacattccgttatcgtcaggattccactttcctttattatttcggactttcatgtgccggactttcggctattatcgatatagatgaagacaaagaaattatctttggtgatgagttgtctatcgacgcaatcgtatggatgggatcacagccgacgttgcacgaaaaatgcgaacgtgtaggcgtaaaaaatctgatgccgtctgctgacattgtaagctacctccatcagtgtgtacagaaagggaaagcaattcactatctgcctccttaccgccctgaacataaactgaaactgatggactggctgggtattcctcccgcacatcaggaaggttctgttccattcatccgtgccgtgatcgctcaacgcaactataaatctgcagaagaaatcgtagaaatagaaaaggcttgcgatgtaactgccgatatgcatattacagctatgaaagtacttcgtccgggtatgtacgaatatgaagtggtagctgaaatgaaccgggtggccgaatctaataactgccagctatcattcgctacaattgccactatcaacgggcagactctgcacaatcattatcacggaaataaagtgaagccgggtgatttgttcttaatcgatgccggtgcagaagtagagtcaggttatgcgggtgatatgtcgtctaccattcctgccgataagaagttcaccacccgtcagcgtgaagtatacgagattcagaacgccatgcatctggaatccgtaaaggctctccgtccgggtattccttatatggacgtatacgaactgtcagcccgcgtcatggtggacggtatgaagacgctcggattgatgaaaggaaataccgaggatgctgtacgcgaaggtgcccatgcgttgttctatccgcacggactaggtcacatgatgggattggatgtacatgatatggagaatctgggagagatatgggtaggttacaacggtcaaccgaagagcacacagttcggtcgcaaatcgcaacgccttgctattccattggaaccgggttttgtacacacggtagaaccgggtatttattttattccggaactgatcgacatgtggaaagcagaaaagaaatttaccgattttatcaactacgagatagtggagacttataaggacttcggtggtatccgcaatgaggaagattatctgattacagaaaccggtgcccgccgattaggcaagaagattcctttgacaccggaagaggtggaagctttaagataaaaagcctcatcaaaataaaagaagaacctttcttctattcaaaatcaatagcggaagcttttcatccggatgaaaaacttccgctatttttgtcaaagtaccaaatagtccatctaaaatcacattttttctacccttcttttcccgaatcttgcgtaatattgcaacagaattaaaataattcactttttaatgatataaaaacaatgaataacaccatgaagagactacttttatctgtatggctattgtcactttccttactgtccgccgtagctgaaaactatccttataaaagcgatgtgctttgggtcaccgtacccaatcatgccgactggctttataaaaccggagaaaaagtaactgtagaagtacaattctataaatacggcatccccagggataatgtaaccgtcacttatgaaattggcggtgatatgatgcctgttgccgatacaaaaggaagtataactttaaagaatggcaggggggtgattcctgtgggcacaatgaaagagccgggattccgcgactgccgcctgaaagcaaccgtagatggaaagacctattcacatcatatcaaagtaggattttcaccggagaaacttcgcccatatacaaccatgccttccgatttcaaggaattttgggaaaaggctaaagcggaacaaaaggagtttcccctaacgtataccaaagaacatgtcgaaaaatattccactgataaaatagactgttatctcgtaaaattgcaactgaacaaacgtagacaatgcgtctacggatatttattctatccgaaaaaagaaggaaagttcccggttgtcttatgccctccgggagcaggaatcaaaaccatcaaagaacctctacgccataaatattatgcggaacaaggatgcatccgttttgaattcgagatacacggcctgaatccggaaatgactgatgaagaatttaaagaaatcagcaacgctttcaatggcagagaaaacggctatctgaccaacgggctcgacagtcgtgataattattatatgaaacgagtatatctggcctgtgtacgcggtatcgactttctaacttccctaccggaatgggatggcaaaaatgtaatcgcacaaggaggtagtcagggaggcgccctggcattaatcgctgccggactggatgaacgggtgacagcttgtgtcgccaatcatcctgcattaagcgatatggcaggctataaagccggacgtgccggcggatatcctcatttcttcaggaattcggtagatatggatactcctgaaaaaataaagacaatggcctattatgatgttgtgaactttgcgaaattaatcaaagtagatacctacatgacatggggattcaacgatgatgtatgtcctccgacaaccagctacatcgtatacaatgtactaaactgtccgaaagaagcactgattactcccattaatgagcattggacttccaacgataccgagtatggacatctgctttggataaagaagcatttaaagtgaagttttaatcattccatctggatgcgggcaattcttttttcccgtaaccttttttccaggcatacgctttcctcttcctgagataaagcgtatcgccacaatgtttcatcgcctcccaattaaagatagaatggtgacagatgatcttttcaaaccaataaagtatgtgataagtcacgaatggtaacaccatccaccaccatgaaagcagtaacgataaaataagtgctggtatcagggttaaagaaaaacattcccaatactgtctggcatgaattcggagttccatatcttcccagacttccagatatttatagcgggtaaagaaaaaccagcctaacataaaatagtgcttcttcccttttcctaagaaccactttgctaaaagactattataaaaaatcatattcacattttttttgttgcatgtagtcccttcttaacagcaaaagtaattaaaggttcaatattttaaagttttgcataacaaccataacattctttccctaaatatcactcaaatattgtttatttttgtgttcccttgcttcactacaacaaaaggtttatttgtattttctgcaaaggaaacacaattcacgaatatatcctaatttttctgcttaatatttaaagctgcttcctcctaaaaattcacgcaacaaagaagtaggcggaatttctttatcctgtaccggaacaaaatatttgataaacttcaacaatcggtaggcttcacaatattcaggacagttacgcggaacacccatcagaataggctcggcgtgcaaacgaagtacggcaaactcaaaaagtagcgctgaattaaacatgacatcagcattttcctgataagggaatatccatttgtcttcaccggcacgtacactaggccagcgtgatatggtttcacgtgcagaatatccccgataattaaagtcgcggatgatgcggcgcaacaaacggttgtcagtagttggaatccagttatggtcatccaacgaaatagtggtcaatgctgaaacgtaaatcttgaatttccgttcggctggtatatgcggtgtcagttccggattcaaggcatgaataccttccagaatcagaattgtattatcttctattttcagtttatcacctttatattcctttttgccaagagagaaattaaaacggggcaattccacctcctcgccacgaagaagcgcctgcagctgttgattaaacaattccagatcgagtgcataaagtgattcataatcatagtttccgttttcatccaaaggggtttcttcacggtctacgaaataattatccaaagagatcgggaatggcttcaagccatttgtcatcagctgaatagaaagccgtttgctgaatgttgtctttcccgaagaagacgggccggcaatcaataccagttttacccggttgccgttttcaccacgatggaagatagtatcggctatctgcgctatctttttctcctgcaatgcttccgccacattaatcaagtcagtggcatgtccttcttcacaggcaagattaaaatctccggcattattaagccccatgatataactccagttcagatattctttaaagacatccagcattttttcctgcttcacaacttcttcgagcatacttgggttttcacgactcggaatccggagtagcaacccgtcataatacttcacgatatcgaacaatttaagatatccggtgctgggaagcagattaccataataataatcaattgtatcacccaatgtataataataggtataaagagaaccggaagtttcaagtaatctcactttatcattcatcccccgctcgctgaaaacccgtaccgcttccgccgtatgacattcaatacggtgataaggaatattttctgcaatgatctcctgcatccgttgcttgatacgcgtcacatcttcgagttcaatggggcgtccaatccgcaaattgcagaaataaccttttgaaacaggatgttccacaaacaattttccctcgggaaagagttccgtgacagccttaaacaagacaaaacaaagcgaacggacataagtacgcataccggactgatctctcacatccagaaactctacatccttattattatatactctgaaattaagtccctcggagcgattattgaccttggcactcactacttgataaggaaaattaagattaaaaccgtaataaatatccaaaagtgagcttccgatagggaattctttggaattattgttatttttgcaacatatttgtaacatctgtttcatcgagttcgttaaaaggtgaataatttgggactaatatacttataatcagattgagaacaaataaccattaaaaatattatagatggaatattctttttatgattttttaaagctcataggctcattgggactcttcctctacggaatgaaaatcatgagcgagggcttacaaaaggtcgcgggtgatagattgcgaagtattctaacggcaatgaccaccaaccgggtaacgggagttctaacaggagtgttgattacagcccttatccagtcttcttcagcaacgacggtgatggtcgttagtttcgtgaatgccgggttacttacacttgccgaatccatcagcgttattatgggtgccaacatcggtactactgtaactgcctggatcatttcaattttcggatttaaggtcgatatggctgctttcgctcttcccctcttagccattgccctcccactcatcttttctggaaaaagcaaccgcaaatccatcggtgaattcatttttggtttttctttccttttcatggggctctcttatctgaaagcaaacgcccccgacctgaatgccaatccggaaatgcttgccttcgtacagaactacacggatatgggattcttttccattattctgttcttgctcatcggtacaatattgaccatgattgtgcaagcctctgcagctaccatggcaatcacattaattatgtgtgccaacggctggatcagcctggaactgggagcagcactcgtattgggagaaaacatcggaacgactatcacggccaatcttgccgcacttacagccaacacacaggctaagcgggcagcattggcccattttgtttttaacgtgtttggggtcatttgggtattgattgtcttccatcctttcatggatctagtaaactgggtagtagacaccttctttcaaagcagtaatcctgaggttgctatttcctacaagctatctgctttccactctatcttcaatatctgtaacgtatgtatcttgatatgggcagttaaactgattgaacgtaccgtatgtgctcttatccaccccaaagaagaggacgaagagccccgtttgcggtttatcaccggtggtatgctttctaccgctgaactttctatccttcaggcacgtaaggaaatccatcttttcgcagaacgtacccaccggatgttcggcatggtgcaggatctgttgcatacggaaaaggatgacgatttcaataagctgttcagccggatagagaaatatgaaaatatcagcgacaatatggaacttgaaatagccaactacctgaatcaggtgtccgaaggccgtttgagttctgaaagtaagttacagatacgcgccatgttgcgtgaagtgacagaaattgaaagtattggcgacagctgctataatctggcacgtaccatcaaccggaaacgtcagactaatcaagactttaccgagaaacaatatgagcatattcatttcatgatgaagttgactaacgatgcacttgcccaaatgattgtggtagtagaaaaaccggagcatcagagcattgacatcaacaaatccttcaacatcgaaaacgaaattaataattatcgtaaccaactgaagaatcagaatattctggatgtgaacaacaaagaatatgattatcagatgggagtttactacatggatattatcgccgaatgcgagaaacttggtgactatgtagtgaatgtagtggaagccagcagtgatgtgaaagagaaaagagcttcttaacagataaaataaagaataaaaaaggagaatcagtagtatcaatacatacctgattctcctttttatatctaatagtatcttttataaaatcaattatatacgtatgattcagccaaacgccagaacaatgtagattccggaacagtagttgtacgaagcacttttgcagtcccgccttccgaggccggatttatattggcaaaaatattccatcccttataaaaagagcagttactataatagtatgatttgtcactgcctgtcaatgtaaaagaacggtcggcatactgataactcaccaatgtagcttttccggcagaagaccctttacctgaccagttggaaatagcaattcgccccacccttttatctccattaaaaacaaagaaatctcctaacgtcgccacaagagcgtccgcatcatctgaggttccggtccagtaaccacccataccattacgctggtctactgtctgaagcttttccgaagaaaaactagtgggaagtgtcattactatttgcccgttctcataaggaaagctaagagtctcaatcacttgccaatcaacacccgtcactttcacctcaacccggtcaaatgtgaagtccgcaggtatattctgtatatcttttactacaagcgtgctataattcggaacatccggagcaggaggttgctcttcattctcatcgtcgctacaaccagccatcaaaaggctgaatatcaataatacaaagattacagggtatgatagataccttagatcggttatgacggttgctctattatacataacttccgttttttgcatcaaagatatcacatttataatcagcagaataatttccaaccataaaaataaaaaatgaccgggtatatatttatacacccagtcattctcctcttaataattctctctcttggttttatccttcgtacggttcaaagtcttcttttccgactccacataatggacaagtccaatcatcaggaatatcttcaaatgctgttcctggttcaattccactttccggatctccttgttcggggtcgtaaatatattcacagaccgtgcaaatgtactttttcataacgttcgtatttttaattggttttctaaataatataacacaaatagcaagatatttgttcaacactatttttaaactaaagaaaaaaactatctttgtagtcatattatcaagctaaaacaacaatattatactatgcttatagcactattgtctaccttaatagttttatgcgcagtcctactaatcagttttttattggaacgtaggaaatgtctgcggatgcaacaacgattgttccgtgaatccagaaagttggaacgcaccagccatattgccggcgccatcttgaaaaatgtgcatgcctttatcctattaatagacaatgatttcaaggtactgaaaactaactattaccaaaaaaccggaaccagaaaaggaacagaagagaaaagagtgggcgacttgttgcaatgtcgcaatgcattggcagccgaaggaggttgcggcacacatagtttctgcggttcttgcccgatacgtaccgccatacgacaagctttcgaacagaggcgaaacttcacggatcttgaagccactttatccgtagttacatctgataatactaccgtggaatgtgatgcagtaatatccggttcttacttccttctgaatgaagaagagaacatggtaatcaccgtacacgatgttacccgccgaaaacaagctgaaaaggagttacggctagccaaagaaaaagcagaaaaagccgatatttcaaaatctgcctttttagccaacatgagccatgaaatccgtacccctctcaatgctattaccggatttgcagaggtattaggcagtgcaactacagaagaggaaaaggcccaatatcaagaaatcataaaaatgaatgccgacctcctgatgcaactggtcaacgacattctcgatatgtcaaaaatcgaagccggaacattggaatttgtgcagacaacagttgacgtcaatcagttactttcagatttacaacaactttttcaaatgagagtcgatgacgccggaggaaatatacaaattatagcggaatcatcccgttcttcctgcatgattcaaacagatcggaaccgagtggcgcaagtgctttcaaactttgccggcaacgccattaagttcacccataaaggtagcatccgcctcggctatgaagctagagataccgagctttacttttatgtcaaggataccggaaccggaattccagcagagaaattaccggatgtattcgagcgcttcgtgaaactgaataaagataaaaaaggagccggactgggactctccatatctcaaactattgtcgccaaacttggcggtcaaatcggagcgaattccgtagaaggtgaaggctctacattctggtttacaattccttatcggtcatgtggtaaaccacgctaacaaattcgacttcataaaaagttttaattaaacattctatcacaattttatgttgtatttttgcggttcaaactaaacgcatgtatctgcatgagtacaaataaaaatgactattatcatttaggacttactgatgacgaagtcctacaaagcagggagaaaaatggtattaacctgttaacgccccccaagcgtccttctctctggaaactttatctggaaaaatttgaagacccggttgtccgtgtattattagtagcagccgctttctcattaattatctccatcatcgaaaacgaatatgccgaaacaatcggaatcatagccgctatcttattggctaccggaattggtttcttcttcgaatatgatgccagtaagaagttcgatctgctgaatgcagtcaatgaagaaaccctggtaaaagtggtccgaaacggacgcgtacaggaaatccctcgtaaagacatagtggtaggtgatatcgtcattctggaaacaggtgaagaaattcccgctgatggagagttgctggaagctatttctctgcaagtgaacgaatccaatctgaccggagaacctgttattaataaaactattgtagaagctgattttgatgaagaagcgacttatgcctccaatctggtgatgcgtggcactacagtggtggatggacatggtaccatgcgcgtgctgcatgtgggagatgctactgaaatcggaaaagtagcccggcagagtacagaggataacctcgaacccaccccgctgaacatacagctcaccaaactcgcaaatctaatcggaaagataggtttcaccgttgccggtctggctttccttattttcttcgtgaaggatgtagtgctatattttgatttcggttcgctgaacggatggcatgagtggcttccggttttcgaacggacactgaaatattttatgatggcagttacgctgattgtagtagctgtacctgaaggattgccaatgagtgttacgcttagtctggcattgaacatgcgtcgtatgctttctaccaacaatctggtgcggaaaatgcatgcttgcgaaacaatgggagccatcaccgtgatttgtacggataaaaccggtacactgactcaaaatctgatgcaagtgcacgaacccaatttctatggtataaaaaatggcagtgacttgtctgatgacgatattagcgcacttatcgcagaaggaatcagcgccaattcaacagcttttcttgaagaatcaaccaatggagaaaaacccaaaggcgtaggaaatccaaccgaagtggctttattgctctggcttaacaaacagggaagagattacctgcaactccgcgaacaagctcatgttctcgatcaactcaccttctctaccgaacggaaattcatggcgactcttgttgaatccccattgatcggaaaaaaaatactttatataaaaggagctcctgaaattgttttgggtaagtgtaaagaagttgttctggatggacggcaagtggatgcggtagagtatcgttctacagtggaagcacaactgttgagctatcagaatatggctatgcgtacacttggatttgcattcaagattgtcggagaaaatgagccgaacgattgcacagaacttgtttcagccaacgacctcaatttcttgggagtggttgccatctccgacccgattcgtccggatgtacctgctgcggttgcgaaatgccagtctgcaggtatcggtatcaagatcgtgaccggtgacactccgggaactgccacggaaatcgcacgccagataggtctttggaactctgaaactgatacggaacgaaatcgaatcaccggtgttgcatttgccgaattgagcgatgaagaagcactagacagagtgatggacttaaaaatcatgtctcgcgcccgtccgacagacaaacaacgtctggtacaactgcttcaacaaaaaggagcagtggtagcggtaaccggagacggaacgaatgatgccccggctttgaatcatgctcaagtaggtttgtcaatgggtacaggtacttctgtagctaaagaagccagtgatattacattgctcgatgactccttcaacagtatcggaaccgctgttatgtggggacgttcactgtataagaatatccagcgtttcatcgttttccagctaacgatcaactttgtggcattgcttatcgttctgctaggctccgtaatcggtacggaacttccgctgactgtaacacaaatgttatgggtgaacctgattatggatacttttgccgctttggctcttgcctctattccacccagcgaaacggtgatgcttgagaaacctcgtcgcagtaccgattttattatcagtaaggcaatgcggtctaatataataggtgtgggctctatcttcctcatcgtattgctcggaatgatttattatttcgaccacagtacgcaaggaatgaatgtacacaacctgactattttcttcaccttctttgtcatgctgcaattctggaatctgttcaatgcccgtgtattcggtactaccaattcggcattcaagggactttccaaatcgtatgggatggagcttattgtactggctattcttgccggacaattcctcatcgtacaattcggtggagccgtattccgcacggaaccgctcgactggcaaacctggcttcttattataggcgtttcgtccacggtgttatgggttggagaacttgttcgccttgttcaacgtattattcacaaaaaagacagaaatgaaaagtaaaggaataaaaaaccttcttattgatttaggtggtgtacttatcaatctcgaccgccaacgttgcattgagcactttcagaagttagggctccaaaacgtagatgcattgctggatatccagaaccaggacggactcctgatgcaacaggaaaaaggattgattacacctgccgaattccgtgacggagttcgtaaaatgataggcaaagcagttagcgacaaacaaatagatgcagcctggaatagttttctggtagatatacccacacagaaactggatttattattaaaattacgtgagaaatatgtcgtctatttattgagcaataccaaccaaattcattgggaatggacatgtgctcatttgtttccttaccgcacctttaaggtggaagattattttgaaaaaacgtacctctcttttgaaatgaaaatggccaagcccgaaccggagatattcaaggcaatcatagaggatgccggtatcgagccgaaagaaacgctttttattgatgactctgaaatgaactgtaagacagcccaaaatttaggaatttctacctatacagcgaaagtaggcgaagactggagccatcttttcaacctcaaataattttagagatatgcagattatacgtgacacatcggcaattaccccggaaccctgcgtagctaccatcggtttctttgatggagtacatgcaggacatcgctatctgattcagcaagtgaaagagatagccgccgccaaaggtctacgctctgcattggttacttttcccgttcatccccgaaaagtgatgaatgtggagtatcgtccggaacttctgactacccccgaagaaaaaataagtctgcttgcagacatcggggtagactactgcctgatgcttgatttcactccggaaatttcccggctcactgcccgggagtttatgacacagttgctaaaagagcgttatcaggtaaaatatctggttatcggctatgaccatcgtttcggacataaccgcagcgaaggtttcgaggattatgtacgttatggaaaagaaattggcatagaagtaattcgcgccaaagcgtataccagcaatatagaaatagggaacgaacccaacattccggtgagctcttccctgatccgcaaacttcttcatgaaggagaagttagcctggccgcccattgtctgaaatatgaatatttccttgacgggatcgtagtaggcggctatcaggtaggcagaaagataggtttcccaacggccaatttacgggtggatgatcccgataaactgattcctgccgatggcgtatatgccgtatgggtaacatttgacgggaaaacgtatatggggatgctgaatataggtgtccgcccgacgattgacaatggtccgaaccggacgattgaggtgaatatcctccacttccattctgacatatatgataaattcatccggcttacttttgttaaacggacacgtcccgaactgaaattctccagtatcgacgagttaataacacagctccataaggatgctgaagagacagaaacaattcttaaaaaatagattcttatgcaaaagtcatttatgagcatctctttggtggtaatagctatatccatgttagctatgtttatctatagtttctttaccactaaataaaaaaacatgaaaacggctatcaaattagtattaatagaccttctcattgcgcagattattgctccaatcctgattatgattccctgtacgatctatttgttcgtcaccacgggaaatctggataaagtcactctgacgcaaatgattatgatcccagcacaactagccggtcagattatgatgggtatttatctatggaaagccggttatatcagtaaaaagaaggcaacatggttacctgtgtcagccccttatctggtctgtagtgccattgcaatcctaacttgcgggtttgcagtttcctcactaatgagcctgctggattggattcccaatatcatggaacaatctttcaacattctccaatccggttggggcggcattcttgcaatagccatcgtaggtcccgtacttgaagagttattgtttcgcggagccatcacccacgctttacttcagcaatacaatccgactaaagcaattctgatttccgcacttctgttcggtgtctttcatataaatcccgcccagatccttccggcttttctgatcggtatcctgctggcatggacttattacaaaacaggcagtctgataccttgtatactgatgcatgtactaaacaactcattgtcagtctatcttagcatcaaataccccgaagcagaaaatatggacgacctgattaacggtaccccgtatctcatcgtcctattcgggtcaatcctcctgtttatcggtatcatactgaccatgaaccacctgacttcccaaaagcagcaataaaaaagggaagtttttacttcccctctttcgctttgaatgctaatgcatacattcgtatttgttttaccatcgacagcaaaccgttgctacgcgttggcgatagatgttctttcagcccgatcttgtctataaaataaagatctgcattcaagatttcatcaggagtatgtccggaaaggactttaatcaatagggcaataatcccctttacaatcaaagcatcactttctgctttaaaaacgattttaccatccacatcatctgcttgaagccataccctgctctggcatccttcaatcagattttgttccgtcttatatttttcttcaagtggttcctgttcatttcccagatcaataagtaattgataacggtccatccaatcgtcgaagtcactgaattccgcaatcacttcatcttgtagttcattaattgacattatagtaattatttaattagacaatataccaatgtgcgaatagcagatgccgtatttaaaaccggcataccaatctatcaacaccttattatattatttctcaattctattatttctcattgtaaatcacttccaataccgtctgaccgactgctttcaacgtattcttatcaatatgttccatattgtcattgacagtatgccatgtcggggtaaaatcaccttcctgattgtagggaatgatatcgatcgttttaatacgtgccagacgatttatgaacagatggtcgtctgttacaaatcctccgtttccatccatgaaagtctttccgtaacccgctttctttgccgctttccaaaccttcttatttatgtccggagcaaattcttccgaatacccttctttcataaacacactgccttcacctcctaccatatcgagcaggataccaaaacgtgcattatatccttgtacatgaggattacgtgcccaatactgcgatcccagacaccagaattcctccttatgctttcctgtataaaactgtggcgcaccgtagtcctctgcatccaacagaatgatatcaatccccaattccggttgttgctgattgaccagacgagctatttcgagcaaagctcctaccccactggcaccatcatttgcacccagaatcggagttttatggttcttctcgtcaggatcgttatcagcccatgggcgtgtatcccaatgtgcaaacaaagcgattctctttttactttccggcttataagaaccgataatgtttctcgctttcaacaacgtaccgtcataagcaatcaaatcagcatattgattagtcacttgagcaccgaaagcctctaattgactggcaaggtaattgccacaggcaacatgttctttagtgttaggaacacgaggtccgaaatctacctgattctttacatacaaataagcactatccgcatcaaactgaggtacattcacaactgtcttttcgtcttgttcactcgtactatttgccttgttacctccaccgcaagagaatgctgataataacaaaaaggcactcattaatactatcatagttttctttttcatcgtccttttatctattaaagcctcaaaattagtcattttcaccacagcatcgttcagatggaatggattattaacatataaactttagttccacatttttctttcccaccacaagctctacttttgcaccgttgataagcgggagattatgagtcacatgccccaccgggaaattgaaacagacgggataatcatactcttttactaaatctgccaaagcagcatacagttccttgcccaacgaacagtcttcttcatattctgtaaattgaccgataatcaatccggacagtttttctaacacgccccccagtttcaaattatacatcatacgttcgatggcatgcggacgttcgctaacatcttcaataaacagtatagtgccttccgccggaatatcataaggagtgccacgcaaaccgtaggctaccgccatgttaccgccatgcaaaacgccttgtgccgtcccctgcttgttcagtttatgcttctcgcacatgtaagaaggaatatttcccaatagaatatccttcagatagttcgcacaaagatcgtcttccggttccaccgtaagatgacgtgccatcaatgaatgaagggaagcatatccatttttctgaaacagattgtgcaaagcggttatatcgctaaagcccagtaaccatttcggatgttcacaaaaggccgtaaaatcaattttatcgatcaaatgtaccgccccgtaccctccacggctgcaaagaatagccttcactttagggtcgtccatcgcatcctgcaaatctttcagccgctgcttgattgtcccggcatatcttccggatgaacttccggcatgctttcctatagccactttcaagccccatgattccatccgtttcttggctccttttaggaattgttggtctatcttactcgaaggtgatacaataaccactttatcacctttctgcaaaaagggaggaaattgaatatccatatatgttcttattttattgactttcgttgataaaaacgcacccagtccacttccatttctaccggaagatcctcgggagagactgctcccacccacgaacctcccaactgcatatcaatcagcagataaaagggctgattaaaagggaattgtccttcttctttcgtttgtatgcgggggtaagtaaacgtatgtacatcattgacataaaatgaaagactatccggatacatttcgactgcaaaaatattgtagcggtcagggtgaatcactcccgtagaatgtgataccggatgatccttgatccccagcgtataagtgtaatgggaatgaactgtctgataagcaatagaatcgttattcaaacgttccatgatatcaatctcaccgccggatggccatgccgctccttcaggcaacatccagatggcaggccatgctcctcccgccgcattcaacttggcacaaatctcaatacgcccgttcgtaaaagcctttttgccttttgtatacacaccgcctatcaaataaggggcagtgtcattgcgttgggtatgattgacaatacctctcaacaccagtttgcctttacgcatggcatagcaggaatcaaagtctgtcatatagttattccagtctgacttacctcgtggaatcttgctccagacctgtgaatcgaaactctttttctgattaaagttctcttcccagatcaaagaccaaccggaagacgtcttgctgcttttacaggaaacaagcgtccaacaaaggagaattaagctaagaaataatagatttttaaactgtttcatggtgcttttattttattgggggatttatttgcaaaaatacaggaaaaaacggttccatgcacatccaacagccaaaacaaataaaatatagcaaaatgttacataatggatgtaatttttcgggttataatcattattttttcaatcatttttctgatatttgctaaaaatctaacgttatggaacctattctaaattttgcccagttaacggctcatcttaaaaaactaaaccatagaaaacgaattgccgtggtctgtgcgaacgatcctaacactgaatatgccatctcccgtgctttggaagaagggattgcagaatttctgatgattggagattctaccattctgaagaaatatcccacgctcaaacaatatcctgaatacgtaaaaaccatccacatagaaaatccggatgaagcggcgcgcgaagctgtccgcattgtgcgtgaaggaggagcggatattttgatgaaagggattatcaatacggacaacttactgcatgccatactcgacaaagaaaaaggtttgttaccgaaagggaaaatcctcacgcatctggcagtaatggaaattcctacttaccataaactgcttttcttctcggatgccgccgtcattccgcgtcctactttacagcaacgtatagaaatgatttggtatgctatctgcacctgccgtcactttggtatcgaacaaccgcgtgtcgcattgattcactgcacagaaaaagtgagtgccaagttccctcattcactagattatgtgaatatcgtagaacttgccgaagcgggagaattcggaaatgtgattattgacggcccgctggatgtacgtactgcctgcgaacaagcaagtggtgatattaaagggattgtatctcctatcaacggacaggcagatgtcttgatattcccgaacattgaatcgggtaatgcattctacaaatccgtctctttgtttgcacaggcagaaatggcaggattgctgcaaggtcctatttgccctgtagtacttccatcgcgtagtgattccggcttgtccaaatattacagcattgcaatggcatgcttacaagtgtcaggagattgcaaatgcagaaaacaagtcagccaagtcaccggctcatcattctaaattcaccactaaaagcctactattcatgaaaattctggttatcaaccccggttctacttctactaaaatagcagtttacgaaaatgaaactccgctgtttgtcagtaatataaaacattctgtagaagaactatccgcttttcccgaggtgatagaccagtttgaattccggaaaaacctggtgttacaagaattggaaaacaataagatacctttttcttttgatgcaatcatcggacgcggcggtttagtgaaaccgataccgggcggagtgtatgaagtaaatgaggccatgaaacgtgatacagtgcatgctatgcgtacccatgcttgtaacttaggaggattgattgccagcgaactggcctccacattacccgactgtccggctttcattgctgatccgggagtggtggatgaactggaagatatagcacgcattacaggttctcccttaatgtcgaagatcaccatctggcatgcattaaaccagaaagcaatcgcccgccgctttgccaaagagcagggaacccaatacgaaaatctggatttaattatctgccatctgggaggtggcatctctgtcgcagtccatcaccacggacgagccattgacgccaacaatgcattggacggtgaaggtcctttctcaccggaacgtgccggtacacttcccgccggtcaactgatcgacctatgttttagcggtcaactcaccaaagacgaattgaaaaaacgtatctccggacgcgctggactgaccgcccatctaggtacaaccgatattcccgccattatacaatctatcgaagaaggagataagaaagcggaactgatactggatgccatgatttacaatgttgcaaaagcgataggagccagtgccaccgtactttgcgggaagatagatgccatccttctgacaggaggtatcgcctattcggactatgtgatttcaagactgaaaaaaagaatctctttcctggcccccatctacgtttatcccggagagaatgaaatggagtcactagcatttaatgccataggagcactaaagggggaattgccgatacaaatctataaataggcgggcgcacaaaaaggctattcagttaccaatcaccaagcaatctgatagtttctgtttctaattggaaacggctaactgtacagcatcattcacaatgcctgctaatataaagtcttgagcacataaatggttcgaccaaaaagaacactaatacaaataataacagtaaggtatatttgtctatttcacatagatagttgaataacatagtaaaaaagtacttttgcgatagtttctttagcggggttaataaaaaaagcgcctattagccatcgcattaaccacgattttaaccacgaccttaaccacgaagctatacctttgccatgtctcaacccgtgggaacattcaacattggcaacacatgaaaacgctgtgattacttcgcaagctataaactcaaaaagaaaattatgaagaaatgttggttattatttttagtgcttagctgcacgcttcttgcccagtccaaagactggacacaatacgttaatccgttaatgggaacacaatcatcttttgaattatcaacaggtaacacctaccccaccattgcccgcccttggggaatgaatttctggaccccacagaccggaaaaatgggagacggatggcaatatgtctatacagccaataaaatccgtggattcaaacaaactcatcagcccagcccatggataaacgattacggacagttctccattatgccgatggtgggtaaacctgaattcgacgaagaaaagcgggctagctggttcggacacaaaggagaagaagcaactccttattactacaaggtgtatctggccgaatacgatattgtcacggagatgtctccgaccgaacgtgctgttctcttccggttcactttcccggaaaacgcacattcgtatattgcagtcgatgcatttgacaaaggttcttttattcagattatcccagaagaaaacaaaattatcggttatagtacacgcaatagcggaggagttcccgaaaacttcaagaactattttattattcaattcgataagcctttcacctataaagccactgtaaataatggaaatattcaagaaaatgcaaccgaacagacaactgaccatgcaggagccattataggttttaaaactcaacgtggagaacaagtacatgcacgcatcgcctcttcctttatcagcttcgaacaggctgcaagaaatatgaaagaattaggaaatgacaatctagagcagataaaacaaaagggacagaaagcatggaaccaagtactgggaaaaatcgaagtggaaggaggaaacctcgatcaataccgcactttctactcctgcttataccgttcgttacttttcccccgaaaattctacgaactggacgaagccggaaaacctgttcattacagcccttataacgggcaagttctaccgggatatatgtttaccgacaccggattttgggataccttccggtgtcttttcccattactgaatctgatgtatccgtcgatgaataaagaaatgcaggaagggctcatcaatacctacaaagaaagcggattcttccccgaatgggccagccccggacacagagactgcatgataggaaataattcggcttccgtactggcagatgcttatttaaaaggtattaaagtagaagatgtgaaaactttgtacgaagggttaatacacggaacaaagaacgtacatcccaccgtatcttccacaggaagacgcggatacgaatattataataagttaggctatgtcccttatgacgtaaaaatcaatgaaaacacagccagaactttggaatatgcctacaatgactggtgtatctatcaattagccaaagaattaaagcgaccggaaaaagaaatacagctctttgccaaacgggcgatgaactataagaatgtattcgataaagactccaagctcatgcgaggaaaaaatgaagatggaacattccaatctccattctcaccattgaaatggggagatgcatttaccgaaggaaacagctggcactactcatggtctgtattccacgatccacaaggattaattgacttaatgggaggaaaagatatgtttatcactatgctggattctgtattttccgtacctcctgtctttgatgagagttattacgggcaggttattcatgagattcgtgaaatgacaatcatgaatatggggaattacgcgcatggcaatcaaccaatccaacacatgatctacctatacaactatgccggtcaaccctggaaagcgcagtattggctacgccaggtcatggatagaatgtacacaccgggccctgacggatattgtggagatgaagataatgggcagacttcggcatggtatgttttctccgcattaggtttttaccccgtatgtccgggaaccgacgaatacgtcgttggagctcctctttttaaaaaagcaaccttacatcttgaaaacggtaacagcctcatcatccatgcaaccgataacaacaagaagaatatgtatattcaaacaatgaatctgaacggcacagaatataaaaagaactatctacgccatgaagacttattaaaaggaggaaacattaacttccaaatgggaagccagcccaatttaaacagaggaacggaagaggaaagctttccttactccttctctaaagtcctaaaaaagattcgttaaattcataaaaaacaagagactgtttaactaagtctcatgttgataagtttgcctctattatgggaatccatagcagaggcaaattttattcttcaagacttattagggatattcattaaaaggaaaaagtgatctccttattcatcaacgtttcaaaaatcagaaaaagatagaggagccacacaccttatagcaacatgtatgctacttctcttaagaaagagtaacttcttccaataaagcaagctcccaactacgccaaacaatagtaattaacttcagttcacctttcgccctggcttctgccaccagttcatcttcactataacgaagtaactgttcgcgcgcctcatcagcaagggcacgtatttctttttccgaagcaccggcttttgcatatttcacctcaagcagataggtgaaaggaggcagtacaggaaccgacggactaggtttgaagaagaaatctgcaaaacccttattcaattcgtattccggatagagctgataataacgatacattcctaaataggcaagcaagaagcctttaatgtgcgcttcaccttcaatatattcacggatacgactttgctcacgaacagcattggcgataaaatcgaacaaaggtttccagtctcccctgaaagccatattctcaaataaagcactcatcctgttcatgtcaattttaaagatatcatgcttgatgtagccttgtatcaagaaattaaacagttgttctcttacaaccaaattcggtacatgtaaaatgggtcttcccaccatgtccacacctttgatggaaagaagtccgaaatagaataataaagacttgaaattactggggtccgtcatctccaatgcagagaaatgagtaacgatgtcagtagtgatttctccttgctcggctatttcctttataacggaaaaattctctcccaacccgtgatctagctttatcaagtatgccaacttgttaaagtcagtgcgaatattgggatctacgatttcttcaggcttttccccatgtaaaacaaaagacttcataaaataaagtaccatatcagagttaaacatacagtccaccaatctacttctactaaagcaataattgtcataattaggtttcatcatgacaacagtttcatctacagattgtatcaacactccttgttctttataataagtcagcatttcacgcaattctttctcactaaaaccaactaaatcattaaaccaaggatcagtcgttatattggttccgatgttaaagccactagtcacatcatccatcgtcaccggactcactccggtaataaacaaccgttcaagagcagctccggttccggtagtagcggattttatcacgttaaagaagccacgaataaaaccttcgccatgcgttgctttcctataaaattccgtaccgtaagtcgaaagaatggtattggtgaaattatcatattcatcaatgagtaaataaatacgaatatttttcttacgggtagcataggaattaatcgcagacagaaaagcaccgggttcttcttgtattttctcatcaagaacatcccaaatttcttttcctaacaaatcttcatacttaaagacaaaatctttaagtttgctacaacaatgcagcttaaacgatagttctacttcattgacattggaactcacttccgaaaaattaaatcgcatgatgagaaactgattgtggagcttcgtcggatgctgacctatgtatagctgaccaaacaactcgtcaaactgttcagcatgatttacgtcataataggcctctaacatagccaaagtcagactcttcccaaatctacggggacgtatcagaaacagataaggcggttgcatctctattttttcaatgaacattgtcttatctacataataataattctctttctgaattcggctaaaatcagttattccgtaaggtatttgtttcatcatattgcgattcctttcaatttatctgtcccttatttctgcagacttttttcaatattctgcaaacggcgttctaacgcagcatacttttcatccttttcttttaaaagacgctcgtagagttcagtgattttgtcgataggattgaagttgttaactcgactatcattaatactatcttcggtatcagacttaactatacccatgctgatgtttgccccacctgcactttgttctgaattattcaccgtattattttcaaacaccaccgtctgtgcatcctcctccaaagtcttgagataatcgaaagggacattcaatgcacgtgcaaaacgttgcaacatctcatcatcaatcactttcatcttctcatatttagaaacagcaggttgtgagagatgtactaattcactcaaaccctcctggttcatatccttttcaatacgggtacgacgtatattgcgtccgtgatggactctcccaattgtcaattcttctgtttccatttttattttctttctttttaaaatccaacaaatatacaaatgaaaagtttcgctcgaagcaaatatacgaaaaaaacgaatagatgtgataatatggataaaaggaatattacaacctgacaaatagaataaaatgaatacttcaaacagcgcataatgtgttaaattatcacgaactttaccgcacgaaagggcaacaaaacaaaagagcttacggacatgaaaagaatattgacaaataaagaatacaggttcataaaagggctcaaagaattgatgattaaatacaatgcggtgatctctacagatgcgcaagggaaaattgagattgtggtgaatgaagacaacgaatcatttgattttgaagcagaaagcacgatctatttaggagcttgtttttcagattatgagttaaatgaattactggaaaagaacttcgcacacataaaacgaataaaagaggagtataaaacaaacttgtaaacggatctatataatcgaaaaatcattaatcctaatctctatataaacaccccaccggtttctttaaaaccaacgacctcttccttttaaaggaaggggtcgttcctttaaaaggagtgaagctttggttttaaagcaagaaaaacgaccttattaacaggtatatttgcctgtatcataaactttttaaataaaaaagctctttcaaagaaatttttctcatatctttgcgacgtgttaagttaataaattgattaaggtcgatttttgactgtttcgaatcgggaagtatgggggtactttccgattctttttttggggaggatataacaaggtgtctttcatctttttaaaggttttaataaactgaataaatctaatatatactaactctatatataaaacagttcaaccccggatgatactaataaaaaaagaaggctgtttcaaaattgaaacagccttctttatatatagacgctatcgcgttcttatttcttttctggtcttggcatcaacacttttcttgaaagtttgaatttaccagttttctggtcaacatcaatcagttttacttcgatttcatcaccttccttaattccagcttcttctactgtttccagacgcttccaatcaatttcagagatgtgcagcaaaccatccttgcccggcaagaattcgatgaatgcaccgtaaggcataatagaacgaactttacctttataaacttcgcccacttcaggaacagcaacgattgctttaatcatgcgcattgcattatcaatacattttttgtttgttccggaaacttcgatgcgtcccataccatcaatttcttcgatagtaatcacagcaccggtttcttcctgcataccttggatgatttttccaccagggccgattacagcaccgataaattctttaggaattgtcatcgtttcaatgcgtggagcatgttctttcaggtcagcacgtggttcagcgattgtttcagtaatcttacccagaatgtgcatacgtccttcttttgcctgattcaaagcacgttccagaatttcgtaagacagaccgtctaccttgatatccatctgggtagccgtaataccatcttttgttcccgttactttgaagtccatatcacccaagtggtcttcgtcacccagaatatcagacaatacagcatatttttcttcgcccggattcttaatcaatcccatagcgatacctgataccggtttcttgatcttcacaccagcatccatcaatgccaatgttccggcacatacagtagccatagaagaagagccgttagattcgagaatatctgaaaccacacgtactacatacggatagtcagcaggaatctgtcctttcaaagcacgccaagccaagtgaccgtgaccgatttcgcgacgacctacaccacgttgtgcttttgcttcacctgtagagaaaggagggaaattataatgcaataagaaacgttcttttccgtgttccaaaacatcgtcaatgatcttctcatccagtttggtacccagagtaacagaagtcagtgattgtgtttcaccacgagtaaagatagcagatccgtgaggaccaggcagaggaccaacctcacaccagatcgggcggatttcagtagtcttacgaccatccaaacgcttaccttcgtcaaggatagaacggcgcatggcttctttttctacatcgtggtagtaacggtcgatcaacgcacccttttcgtccaactcttcttcagagaattgagctttgaattcttcacggatagcttcgaaagcagcaaaacgttcgtgtttgttattgtttccggaagcggcaacagcgtaagctttttcgtagcatgcttcacgaacagccttgcgcaaatcttcgtcgttcacttcatggttgtattcacgtttcactgtttttccaacctcttcagtcaactccatctgtgctttacaatgaaccttgatagcttcatgagctactttcattgcttccagcaattcagcttcggatacttcgtgcatttcaccttctaccatcatgatgttctcataagtagcggccaccatcagatccatatcagctttttccagttgttcaaaagtaggattgataacgaactgaccatcgatacgtgctacacgtacttcagaaatcggtccgttgaaaggaatatctgaaacggcaagtgctgcagaagcggcaagtcctgccaatgcatccggcatatccacaccatcagcagaaaagaggatgatgttcacatatacctctgcgtgataattatcggggaataaaggacggagagcacggtcgacaagacggcaagtcagaatctcataatcagaagctctaccttctcgcttggtgaaaccaccgggaaaacggccgaatgccgcaaatttttctttgtactctacctgtaaaggcataaaatctgttccgggaactgcatctttagcggcacaaacagtagctaacaacatggtgtttcccatgcggagcattacagaaccgtctgcctgttttgccaactttcccgtctcgagcgtgatggttcttccatcaggtaactcgattgtcttaacaattgggttaatcataaaaattgttttatctatactttttctttcaaaattcctgcaaagatatacatttatcgtggtaattaggtggaaatgaggtaaaaagttagtggcgaactgattttttttcaaaattaggatgaagaacacagcaaaatgctttgactaatctcgaaaagaagtatatttgcatctcgttaataacacacactatatgaaaaaggttacttttgcagcgctcgccgcacttactattactgcttgtagttctggccctaaattccaggtgaacggggatgtatcaggagccgacggtaaaatgctttatctcgaagcttccggtctggaaggtattgttccgctcgattcagtgaagctgaaaggggaaggtacattcagtttcaagcagcctcgtcccgagtcacccgaattttaccgtttgcggattgacgacaaaatcatcaatttttctgtagattctatcgaaacaattcaaatcaaagctccgtatgtggatttctctactacttatacggtggaaggttcggaaaacagcaataagataaaagaactgacgttgaagcagattcgccttcaaaaagaggtggacaatttactggcatccctgcgcagcaacggaatagggcatgatgtatttgaagacagcctggcaacattgctcaacaactataaggaagatgtcaaagtgaactatatttttgctgctcccaacacggctgcagcttactttgccctgttccagaagctcaataattatctgatattcgatccgttgaacaataaagacgatgtgaaatgtttcgcagctgttgctacgagcctcaacaatgcgtttcctcatgcggtacgttccaagaacctttataatattgtaatcaaaggaatgaagaacacgcgtcagccgcaaacaaaagctctggaaattccacaggacaaaatcgtagaaaccggtattatcgacattgccttgcgtgatgtgaaaggaaatgtgcgcaagctgaccgacctgaaaggcaaagtcgttttgctcgatttctctgtattccagtcgcctgccggagctcctcacaacctgatgcttcgcgaactatataatgaatacgcaaaacaaggactggaaatataccaagtatctctcgacgcggacgaacactactggaaaacagcggcagataatcttccatgggtctgtgtgcgcgatggaaacggagtttactctaccaacgtagccgtatataatgttcgtcaggttccatctatctttttgattaatcgtaacaacgaattgaagcttcgtggcgaagacattaaggatttggaagcagctgtcaagtcattgctctaagttgttataatttagcatatttcatttaaatatgttacatagcatcttttttcacttgacacgtatcacttaaaaggctatctttgcaaagaaataatgaaaagagggttccaacatggctcatgttggaattcttttttgtttatatgaccatttaaaacaattaaaggaggaaaacatcatggcttatatgtcagaagaaggttacaagaaactgatggcggaactgaaggaactggaaacagtggaacgcccgaagatctctgcggcaatagccgaagccagagataaaggagacttgtctgaaaacgctgaatacgatgcagcaaaagaagcgcaaggtatgctcgaaatgcgtatcaacaaactgaaagctaccattgcagatgccaaaatcatcgatgaatctaaattgaaaacagattccgtacagattttaaataaggtggaactgaagaatgtaaagaatggcatgaagatgatttataccatcgtttcagaaagtgaagctaacctgaaggaagggaagatttccgttaataccccgattgcacaaggtctgcttggcaagaaggtgggtgatgtagcagaaattactgttccacaaggtaaaattgcactggaagtagtaaacatatcaatttaacgtaaaggcaggtctccatgtgaggcttgccttaatttatcaataaaagttatggcaacaatattcagtagaatcatcgcaggagaaatcccctgctacaaggtggcagaaaacgaaaagttttttgcttttctcgatatcaatccattggtaaagggacatacattggtagtgcccaaacaggaagtagactatattttcgatttgagcgatgaagacctggctgctatgcacgtgtttgcaaagcaagtagcctatgccattaaaaaagcattcccttgccaaaaggtaggcgaagctgttatcggactggaagtaccccatgcacatattcatttaattcctattcaaaaggaatcggatatgttgttttcgaatccgaaactgaaattgtcggatgaagaattcaagtccatagcgcaagcaatcaactcctctctataaaacatgatgatgaaataatgaaaggcattccgtgatggaatgccttttttctttacttttctttactttcggccacttcaaccaggtaaactccaatacagataaaaatgattgcaaatgtctgcgtccagctaaaacgatcttgtcctagagcaagggaagcaatggtcgccacaatcagaatcaaataaccatagatagcgactaccgtcgtcttcagatatttcaaaccgacaggcagcagcatataactgatagtggtcgggaaaatcaatacgaacatcagaataaggaaaggcgtccaatggaacggcatggagaataccggggcatcaaatcctgtaataaacgtgactataatggcagacacggcagcaccggaaaaggtatatcgcaacatcgttatcgctccaatggccgtgaggatgcgctgactaagaatcagatagacagcatacaccacagaacttagaagacaaagcatattccccgtaaaagcatcagaggccaaatcatcgctttgctgggttaggatgcaaaccaacgctcctatcagaccgatagaaattcctattatttttttagcgcccgccttctccttataaaagaatatcatgataagaaaaacccaaataggctggagactggtaaatatggaactggagacaggagttgttttactcaatccggccagatagagaaacataaaaccgtaaagtcccaaagcccccaacagaaagaggagccatttatctctggttgacgatttctccggaggcataaaccacccgatcacccaaaaagcagctgctgcaaatgtgcaacgaagcgtggctcctgtcaatggactcatccacaaaggcagaagatactttaaggcattcatatttaaaccgctaaatactttcgagacagccatactaagattggcttccagtttcttattcttcattttctattttaattggtcgttaaacaaaaaggtattacggcgccgatatgcccagaaaagagtaacaatagttatcagaagattaaagataaaaggaaactcctgtgattgggtatggaatatccactggaaaaaatcgacaataaagggataaagcaagatagccagataattcatcatcatcacaaacgccaaagccaatgtggtcttttgcggcagtgcggtctgggtggtcttatcataaagcataggttgaataatgccatatcccaaaccaaccaggatacatccgggaataatcagccattcgatcggagctatccagattaataacaatcccaatgccatcgacagcaggctgtatgcttttgtacgtcctttcagcagggctacaatcttgtccaggcaaaaacccggagcagtgatggccagaaagaaaagcgaaatcatcaatccggaattgccactggagaagtgatgcttttccattaagaaaggtagattgaagatcaccactaccacgatatatgttatcacgccatagaagagcatcaactctatcagatgtttgatgtgaataccgtacttgctgcctcctatatctatggaagtagattgttcggaggattcgttgtcttttgtagtatctgcagaagaagaaggtgtaaaagcgacttctcccgtccggtcttcttttaaatgtcctaccagcagaatggaaatcaatgggaggagatagaccaggaaaggcagatgccagctgacttctgcaagatagcccgttacggcagttgctatcactaatgtgaaattagtaatagcggagcttaatccgaactgtttcacccgataggttcctacaaagtatctggaaaccaacccggtagataaagggataatcagaccggaaccgataccgagcaaagcacttaccacaattaattgccacattcgattggaaatcagatacaaaataccgctcgcggcaaaaagccagagtccgacctttaatacacggacataatcgactttctctgtcagtttaccacccagcaatataaaaggaataatgagcagtgatggcagcgaagtcaacatctgtatgtccagatccgtagcttttggaaatatcttcgtaagatcacccaatataggtgaaacagccagtcccggcaatgaagtcaatgccgaaatagaccagatggcaattaaagtaataagaggaattgttccccgtcccgtctgtatcttcataatgcttattcgttaaaagtttaggtttgaagaaaacaatagttgctttataaagttcaaatatgcaccgaaatgagccaaatgaacatttattgaaacgcagattaacgcagattttcgcagattattagaaggctgcgccatgtttgagaacttttttattctttgcgaaaatctgcgttaatctgcgtttcaatacttatttgctaaaatatcaattgattcataaccgtgtgggaatgaactaatcttagttcttctaaaatttaattggtaatatgcgatgatttaatattcatcatacataaatttattcgtctgacagttgttgaactttcgtctgacagctgttattctttcgtctgacaactgtcagacgaaaaagaaacaactgccagacgaataaaattatgtatcattagccataaacccattaggcatcaaaaataaatctgcacaagctcgaaattagttcaaaactagtacgatcataagcttttccactaaatcacaaaagctccgcttcaataagggcgtcctcctccttaataaacgccaaataatgtaaaaccgggaaactttcaaacctatctgctgttgttgtgggaaattcgacggggaaaatccccatcgccctaaacctttaaaaaaacaaattagtatggaagatttaaatttcagaaaaggtgatgcaaaaaccgatgtatttggttcagacagaatgttacaaccctctccggtagagaaaatacctgatggacctactactcctgaagtcgcctatcaaatggtgaaagatgaaacatttgctcaaactcagccccgtttgaatctggctactttcgttaccacttatatggacgaatatgcaaccaagctgatgaatgaggccatcaacatcaactacattgatgaaacagaatatccgcgtatcgctgtgatgaacggtaaatgtatcaacatcgttgccaacttgtggaactctcctgaaaaagatacctggaaaacaggtgctttggctatcggttcttcagaagcatgtatgttgggtggtgtagctgcctggttgcgttggcgtaagaaaagacaagcacagggcaaaccatttgataaaccaaactttgttatttctacaggtttccaggttgtttgggaaaagtttgcacagttgtggcagattgaaatgcgtgaagtgcctttgacgcttgaaaaaaccactcttgaccccgaagaagctttgaaaatgtgtgatgaaaacaccatctgtatcgtaccgattcaaggtgttacatggactggactgaatgatgatgtcgaagcattggataaagctctggatgcttacaatgccaagaccggttatgacattcctatccacgtagatgccgccagtggtggtttcatccttccgttcctgtatccggaaaagaaatgggacttccgtttgaaatgggtactttctatcagcgtatccggccacaagtttggtttggtatatccgggactcggatgggtttgttggaaaggcaaagaatatctgcccgaagaaatgtcattcagcgtcaactatctgggcgccaacattacacaggtaggtttgaacttctctcgtccggccgcacaaattctgggacaatattatcaattcatccgcttaggattccagggttacaaagaagtgcagtacaactccctgcaaattgccaaatatatccatagtgaaatagccaagatggttccgttcgttaactactcagaagatgttgtgaacccgctattcatctggtatctgaaaccggaatatgcaaagagcgccaaatggactttgtatgatttgcaagacaaactatctcaacatggttggatggttcctgcttatacattgccttctaaactggaagattatgtagtgatgcgtgtcgttgttcgtcagggattcagccgtgacatggcagatatgcttctgggcgacatcaacaatgccatcgccgaactggaaaaactggaatatccaactcctacccgtatggctcaagaaaagaatcttccggtagaagccaagatgttcaaccacggtggtcgtcgtaaaaccgtaaaaaaataaaatgatctatggataaaaaagtaacactcgctcaattgaaagaagtggtacaggaggcatacgatcaggtaaaggccaataccggcggcaagaatgccgactatattccttatctggcaaatgtcaacaaggatctctttggaatcagtgtctgcctgctcaacgggcagaccatccatgtgggagatactgactatcgcttcggtatagaatccgtatccaaagtacatacggctatcctggcactgcgtcaatacggtgctaaagagattctggacaagattggagccgacgcaacaggcttgcccttcaattcaatcatcgctatcttgttggagaacgatcatccgtctaccccactggtaaatgccggagccatctctgcctgcagtatggtgcagcccattggtgactctgccaagaaatgggatgccatcgtaggaaatgtgacagacctatgcggcagtgccccgcaactgattgatgaattgtacaagtcggaatcggacaccaacttcaacaaccgttctatcgcatggctattgaagaattacaaccggatttatgatgacccggatatgtcattagacctttacacccgccagtgttcattgggagttaccgcattgcagctttccatcgcagccggtacaatcgccaacggtggtgtgaaccctgtgactaaaaaagaagtttttgatgccgtcctggctcctaaaatcactgccatgattgccgccgtaggtttctacgaacataccggcgactggatgtacacttccggtattcctgcaaaaacaggtgtaggtggcggtgtgatgggcgtactgcccggacagttcggtattgccgcatttgctcctcctttggatggttcgggcaactccgtgaaagcgcagctagctattcaatacatcatgaacaagctggaattgaatgtatttagcaacaaccatatcaccgttgttgactaaaattctctcaatctcttttataagaaaggtaaaggttactatctattgatagtaacctttttctattccccttaccctcttgatttcccgccaatgtttcaatacaaacggcatcatttttcaaatgctacaaattgaacttacccctgaacaactctagttattaaaatgagatagctgttattaacccggataaggtaaagtttgattcattcaattacggttataacagcgtcgtgtcttatctcttctcaacaaagatagaaagtaatacctcttttccaccccttttccttcgccgcttataaagaaaagtaattcatctttggttttcaacactttaccgtcatcatcacttcatctgttttttcatcttatccgcaagcacattatgatgtgcttgctttctgtacggctgctttttctgccaattcttttttctcggaagcctttttctctagttcctcctcttcgtaatattgttttctacgtttgttagattgctgaatcagatttgtgatataaactgtaaagatagggaacatcatcatacccagggcagccaacaaaacggaaagtacacgtccggtcaccgtctgcgctatgatattcgaaccgacggtagtgacatccataaaagcccaccacaaagcatctccataaccattcaccaagggattcacccgatgctcaagcacaaaaaatgccagactggaaaaatagaccgttgccaacaacatcgtcagataagagacaaacaaactcgaagcacgattgtaggtcaaccagccgaccacaatggcaagcgcatatcctcctctcaataaaggtatgaaacggagaagataggtgatctcatccgaaaatgtccacccataataggcgataatattctgataaggaatcgccaccaataaaaagataaaatgcgtccgcaaataacgtcccttatgttttgccagaaagaactccaatacaaaatcaaaaagaaaccaaagacagatacatagctgtactttcatatacgaagactgtgtatagaaaggaattcccttaaaagtatctaccgagatactaataaccaggaatagggacattactaatataataatgtgaagaataccatagattccctttttcccggaaataaaatctgaaagcgctgatttcataactacttagtttataataaaatgattcatttataatttagattgcttaaaaacaattggagaaagcgattgtttcggaagaagtaaatccggggttacaatctcccatttcggggatgttaattaacgaactttgaaagagattgcggaaacatctcacgcaaaatgttgttataacactgactttaaaatatttttcacttaaaaccttaacttatggcgaatattaaaaatgcagtgaagctgggtgtgtttaccctggctatcatgaatgttacggcagtagtatccttgcgtggactaccagccgaggccgtatatggaatgagttcggccttctattatctttttgcagctattgtctttctaatccctacatcgctcgttgcagcagagttggcggcgatgtttcaggataagcagggtggtgtgttccggtgggtaggcgaagcctacggcaaaaaactgggattcctcgccatttgggtacaatggatcgaaagtacgatctggtatccgacagtgttaacgtttggtgccgtatctatcgctttcatcggaatgaatgacgtacatgacatgtcactggcaaacaataagtattatacgctcgtcgtagtgcttatcatctactggctggctactttcatttccctgaaaggtatgagctgggtaggtaaggttgctaaaatcggtggtatggtcggtacaattatcccggctgccctgttgattatcttgggaatcatttatctggcaagcggcggacattccaatatggatttcaacagcagcttcttccccgactttaccaactttgataatgttgttcttgctgccagtatcttcttgttttatgccggtatggaaatgggtggtatccacgtaaaagacgtagagaacccttccaaaaactatccgaaagccgtattcatcggtgcacttatcacagtgttgatcttcgttttgggtacttttgcattaggtgtgattatccctgcaaaagatatcaacctgactcaaagtctactcgtcggcttcgacaactatttcagatatattcatgcttcctggttgtcaccaatcattgctgtcgctcttgcatttggtgtactggcaggtgtattaacatgggttgccggtccgtcaaaaggtatatttgccgtaggtaaagcggggtatatgcctccgttcttccagaaaacaaacaaactgggtgtacagaagaatatcctgttcgtacaaggtatcgctgtaactgtattaagtctgttgttcgtcgttatgccgtccgtacagagcttctatcagattctgtcacagctgacagttattctttatctgattatgtacttgttgatgttctccggagctatcgcattgcgttataagatgaagaaactcaaccgtccgttccgtatcggtaagtcaggtaacggtttgatgtggtttgttggcggtcttggtttctgcggatcattgcttgcctttatcctcagcttcatcccgcccagccagatctctacaggtagcaacactgtttggttctccgtactgattatcggtgccattatcgttgttattgctccgtttattatctatgcttccaagaaaccgtcttgggtagatccaaactccaatttcgaaccgttccactgggaagttcaggctcaacctgccactgtcaatgtcagtgcaagtaacgctaatgctgcccgtcctaccgcaacttctgcacatacaggaggagcaaccggggcaagtacagctaagcctggtgcaaccgtttctaatgcagcagctcctgatgcggcatcctctggtgccaccgcttccggtgctactccatcaagcagcagttctgctacatccggcggaaattctacttccggcaaagcatctccgggaaccggagacaaagataaggatgcacctaagtcgtaaagaataagtgttcatcctgttcacaaaaaagtaagaggctattcaaacagctttgaacttataaaattaccctcactacagtgaagtgctcccctttagtcggttataaaacctttgggatgcacttcacggttgtagtgaggggaatttattttagagatttttgcaggccctcttatttagaagtatgccaatcatcatttaatagatacaatacctagcgattggagattactttattgcctgtgactttattagttccggttttatcacccgtggcaacacaaagctgaaagtagatccccggttaatttccgaatcaagttcaagatttccacccagattttggatgatcgtttgcgaaagagtcagtccaagtcctgtcccctgcatttcacgatcaagttttatgaaacgtgagaatatttttttctgttcctctttcggtatgccaatgcctgtatcggacacaacaaagcaaacctcttccgttcctttcaggctgcaacccaaacgaatttcacccgattcggtgaatttcattgcattatgtaacaggttagacaatacctgaatgatacgttcccgttccgaatacatcattataggttgtatgtgtgcctcacaaaccaattccaccgacgagttattcaatttcgtcttaaaaattccctccaactctcttagtaaatcattggcatcaaactccgtataaacaaaatctactgttcccgattctatttgagaaagatcgaaaatatcattcaccaggcgcaacaagcgttcattattctctgcaataacatcagcatacatttttcgttcctcttcactggaagccgataccatcaaaccggaaaatccgacaattgcatttagcggtgtacgtacctcgtgactcatattagcaataaaggcagatttcaatttatcagcagaaatggaatgttctctttcaatagacagcagcctttgcgcatttttcagctccgtcacatcataaacagtcaacaccatataatcttcaccatgaatattcaaataagtacccgataccgatacatcgcaaggagtcactttcgtttcatcctcacttaataacttcatggaagcttccagatttttaaaacttgctttcttgtaaaaagcttttccgatagacgcacggatacaacatagtttgcattgttcatgctgaccacattcaccggctgcaatcgcatttctacaatgcagcaaatccccgactcttttggtaactccacctacctgaatcggaagacggtttaaagaataataattggtgtcacaaaccacaaaatccttgtcaatcaataagaagtaagcattgatgttctgcaaaaccagagccaactttttaagttcattctctttgttttccttcgaatgcacctctttctggagtgagtggcactttgcccacatatagatgaaggcagctaacaaaactattataacaataatcgccagtgatgacatagtaatagagtgtttatattgttttgatcgtttcagtgcgtaaatttataaaatatgtcgcataaatagctgtttatctacatatttattctaacaaaaatgcatttatatttccacgagtcagaaattggtaaaaatttccctttaagttattgcggtattaaaaaatatacttatctttgcacccgcaaacgagaaaggtgccatagctcagttggtagagcaaaggactgaaaatccttgtgtccccggttcgattcctggtggcaccacttcttaagcaatcggaatgtagcgcagttggtagcgcactacgttcgggacgtaggggtcgggcgttcgagtcgcctcattccgacaaaataaagggtaactttctggagtacagtaagttgccctttatttctattcagtcacttgaacaaattcaggacggatatgtaataaaacacaacctattatatcatgaaaaacaggatttatctctttacagtagcagtagcttcttttatgtgcatcagctgcacaaaaactcaaactaccctttccgagaatgaaaagacagtcaatcctcccatcatgggatggagttcatggaatgcatttcgcgtagacatcagcgaagacatcatcaagcatcaagccgacctgatggtgaaaaaaggtctgaaagatgccggatatcattatgtcaatgttgatgacggctatttcggaaagcgcgatgacaacggaattatgcatacccacgaacaacgtttcccgaatgggatgaaaccaattgcggattacgttcacggcctgggaatgaaagccggtctctataccgatgcgggcaacagtacatgtggctccatgtgggacaatgatgcagcaggcgtaggagctggtatctatggacacgaaccgcaagacgcccaattatactttggcgactggggtttcgactttatcaaaattgattactgcggaggagatgtgctgggacttaatgaaaaggaacgctacacttccatccggaacagtatagacaaagtaaacaaagatgtttccatcaatatttgccgatgggccttcccgggcacttgggctaaagatgcagcaacttcctggcgtatcagtggagatattaatgcacattggggatcattaagatatgtagtcggaaagaatctctacctgtcggcttatgccggaaacggacattataatgacatggatatgatggtcatcggattccgcaacgacagtaaagtaggtggacaaggtcttaccccgacagaagaagaagctcatttcggtttgtggtgtatcatgagctctcctttgcttatcggatgcaatctggaaaacatgccggattcttcgctcgaactgctgacaaataaagaactgatcgccctcaaccaagatccgctgggcttacaggcttatgtagctcaacatgaaaatgaaggttatgtactcgtaaaagatattgaacagaaacgtgggaatgtacgtgcagtagctctttacaatccttccgataccatctgtagtttttccgtgccgttctcttcactggaatttggaggaaacgtaaaagtacgtgatctggtaaaacatagcgatttaggaaacttctccggtaccttcgaacaaacgcttcctgcacacagtgccatgttcctccgcatagaaggcgaaacacgtctggaaccgaccctctacgaagcggaatgggcttacctacctcttttcaatgaccttggcaaaaatcctaaaggtattatttatgcccatgataaggaagcctccggcaaaatgaaagtaggtttccttggcggacaacctgaaaactatgccgaatggcgggaagtatatagcgaaaatggcggacgctatgatatgaccatccattatttatatggcaaaggacgacaaatagaactggacgtaaacggtatcattaccaaaatcgactctttgggaaaggataacggtcataaccaaatcacagttcccgttgaattaaaagccggatacaacactattcgcatgggtaatagttataactgggcaccggacatcgactgcttcactctgaagaaagcgctgtaatttgactatataacctcatatattaaaaggagtaataacggaataaatatgcctcaggcattttaaaatccattattgctcctttttagtttagatactgtctagtaattcgtatcatattttatctcttcatacctattcctgtttattccggtgttatcgtaatttccgctttctctcttacattcacctgcaaacgtgcatcttctgtcagaggtgtccagaccacccgcttacattctcctttctgcagatcattagagtgctgattgctgccactcagatattccgtccccacttctgtattctcaaatgtccatctccatacaccatccaaattcagatagaagttttcaattttactatcctttgcatgaaagtccagcccatttccctgaatatcacacgaaccaagtcgacaagaatccaatgatatgttataacgattaccacggacaaacaatgaatctgtttcaatacctatcagattcaatttcaaaccttcttcaccggtaactataccggtcagtgaatccacagccaaactcacatcaaaaccactcacaaagatataatctctgtcccgatacttttccggaatattgttcacattaagatctaacttcataaacaaagtatcattcttctgggtaacattcaaatagtctcctttcggatatgaaacctgttctttccctgacgaagcagcagtagatcctattttcatttcgccgctaataaacacacgtctcgcttcagatactccatcctggctggtaaacacctttataacatgtacgccattcaaatccattttcacctgttcattacccaaaaaggctccatcttcctggtaaggcttccccgacataaatatgaaaataatagttgccacaattacaatcaatccggaaacgagaaggcctataaatatataagtagtacgtttcataatatttcgtctttattctatttctgcttttttataaactcatgatacattgtctctatttcttttatcggtatatcaagcgtatacagctgacgaaagaaatagtccaattcttctttcagaaaggtatccttacggagagaatgaatcagctcttttgctcctgaagctacaaaataccctatgccacgtttattataaataacattttgtacctgaagatagtcaaaggaacgcatcaccgtattagcattcacctccacaatggcagcatactctctgacagaagggatccgctcctcttccggatattgccccagcaatatctcatcacagattctatctgcaatctgtaaataaatagctttactttctttaaaattcataggctaaggtattacattctattaataatttcagactccttaaagcggaaataagccagtacccaattcaccaacgcaaaaaagatgccggcaacaattacaatccacagagtggtttctttcgactccagcacacctcctgaataatacctgccgctttccaacagcactttgcttaccaaagcaccgacagcaaaatataccataccaataatggttcccgacgcaaatgttttcaggaaagaatttttaggccaaatcgaactgcccaatacgaataaggattgaacaaagaaataacctgatatcagcgctccaaattccaagcctcgcctgcataaagtataatatttttcatcaccaaccaaatgcgacaagtcgacaggagcaataaaatccttctccggataagccaaagaataaatagtaaaacgcgtataatccgccaacttataacatatcaggaaaacaaccagatacacaactgtaaatacaaaccatctggagaaaaacttctcaaaaggagttgccggaatcattaacatggaagtacggctcgttttcgttttcatcttttccattgtaaacgaagcactcaaacaaccgaatccccacagagcccagataaaagtgacaagaagaaatatccacgccggatcttcctgataattataagtacctctatacctaaaatatccattccaaaccattaccactgccatcactccatacatcaacaccatacgaagcacattcgatttccaattctccaccatctccttacggcaaagattcataaaacgaggcaaactgaaaaaagtatcttttatcatcgtcttttatttttgagtgtgaaacaatcgggctatctcttcaggagtagccagtgtagcattaaaaagaagttccaggtttagttccgactcgtcctgcttttcattaggaaggatcaggtagttaccctgaatagtaggaattgcaaaaagcgcacttttggccaattcccgatcatcactctccacaaagaaaagtttgtcgcaaatattacttgtcgattcatcgagcaacacacgactgtcatccattatcaacacatgatcgagcactttgtcgatgtcacgaacctgatgtgtggaaatcacaatcgtcttatcatccgacatacccgatgctataaacttgcggaactgacttttgcctggaatatccagcccgttggtcggttcatccatcaacaaaagagaggtattcgtagcaagcgcaaaactcatgaacactttctttttctgccccatagaaagcgatccgagatcaatatctatatccatctcaaaataatggagatatttaatcatctcttccttactgaaacgaggataaaaaggactgtttaactcaatatagctgaccaaagaaaccgaaggcaactcaaattcttcgggaactaaaaacatatcctgcaaagtaaccggcaaccgacggcgtacatctgtatcgtgaaacatcactttgccgtttttaggagtcaacaagccggacatcagatagagaagagtagattttcccgcaccattctttcccaacagtccatataccctgccggattcgaacgaaagcgaaaaatcacgtagtaccgcacgcttcgatttacgataagtaaatgaaagattttctactgtaatcatagtatttctgtttaatgaataatgatctttaggtgtattagtgtaatagtacaccacaaaagtaggtaatcttttgaatattccaatagaaaaggagaaaaaagtgcaaaaaaaggaggagctaagatcactctccactcctcctgtcacgacaaacaactaaaattattcactatttgatgccgtccaatgcccttttagcagtagcattagcggggtctatagccagaattttactccagtattctatggatttatctttgttagcctttgcttcggctttcaatgccggattttcgatagctaacaaatagtaatatccaagataactgtagcattcaaccaaagctgaattgtaatgaggatcgtttttgctttccaataaagcggccacttcctcatagaaaggtttcgcaagtccttgagttgtttcagggtcaagtgcagaattggcacgtgctctccagaagttacccaaatagctgtccggcgctgcttccgcaattgcatggaaagtagaatcggcggacattaacgcctgcttacgttcttcaacagtgattgctaatgaatcaggttgcgtaccagcaccgtaataaagtctaccaaactggaactgtaagtccggagtctgtttttccttatcaagagatgcataatatttctggtaagcactgattgcttttttataatcgttcttctgttcgtaagcagaagagatatttttaaataaatccgtcttcgtcggatccatctttaccgctttctcatattgtactactgcatcatcatattttttcagactctccaacagatgtccataatacatataatccaaatacgaataatcggctttatcacattccttgaagaagacatcggcagccttcaacgcttcatcaaaacgtttcaggtcagtataattatacattgccaaacgattgaacgcagcatgacgggcattcttttgcaatcccatattagctacttcgagtgatttatcaaaatcatggttcaaaaataaagcaaaagcatacttcaccaaatcttcttccgtagcagtaggtcccattgcaaaattcgcataagcttctactgccttattaaaatcattttttaaatagtaaatttcggctaattttttatctacagctgtgttggacggttccaggtccttcaattggttcagcttctcaatggcaagacttgcattggctgatttataaatatctgcatatttcagataagcttccgtacatttcggatcgaaataaattgcctcctcatacttttgagaagcaagacccgcatttttctgttttacggcaatatttccttccaatacagaagcaagagccgatttaccattcgcttttctggcaagagctgcatactcctgcgcttcgggaatcttgtcagcattcagatatgcgtctccaatagccaccaacaattccacatttttcttattttttcctttaatcagatgttcagcttcttcagcagcctgtgccggattcgtctgaatagtttctttcaatttcgcaaccccagcctgccattcggcgtcagatgattgcgcatagagcgaccctactgctataaacgctccagctaaaaacatttgtactcttttcattatagtctctaattttagttattattcgtctttcacgtggacaatacgcaccggctgagtagccggaacaagtccggattttaatataatcctctgccctttatcggatgtcataaaagaagcaaatccccaaggcagcccactgcgaggatcattcagcaatgcataaatagatcgtgccaacggatagttaccatagaacaggtaagcctgataaggtttataactgttagcaggagttgccacatcctctgcactcactgacatcactctgatctcttcgcgaaaagaaagattggttgtatcactgcggttccccaaccagtttactccaacaactcccatagcgtcgggattattcgctacataatctatcacctgctggttggttttcaaggcactgacgttaccttcagccaactcttttccaccacagattgagtccattgcaaaacgtacggtactggagttcttattatcgaacactacctgaatccctttcaagcgggaattcggattaacctctttccagtttttcacctcaccggtaaggatgcggcggaaatcacgtacactcaacaaagaatccggattagcacgattcacaatcaatgccagaccgtccgtagccaattttatctcgcgagggaaaaacttacggctgtggaatgaattcatttcttccttagtcagtgtccgggttgcaatagccaaccggacactgtctttcagaagtaaatttatcgcttccacttcagttgtgtagcgagggacaatcccggccaaagggtacaggctctcaaacacctctatctcttcttgtatgataggttcgaaactctcatccgctgcgatagataccacaccggaagaataagtatccgtcggtccttttgattttgagttacaagcactcaagaccaccaacgctacgagtcctatcagcctaaattgtctcttcatcatcttttattgtaatctaaacattaccggaacggtgaacttcacacgtaccgcttttccattctgcttaccagggagccatttcggcatgctttttaccacacgaacagcttccttatccagataagggtctacaccacgagccacatgtacgtcagaaatagaaccatcacgttctacaacgaactgtatgataacgcgaccttgtgttccattctcctgtgcaatagtcggatatttgatattcttacccaggtaagccatcaattcagtctgtccaccagggaaagtcggcatttgttctaccatatcgaaaaccttttccggttccggtgcagcctgtgttaccacctgcttaaggtctgcgatatctttaccattagcctcgtcattaccttttacgtcggcaatagagatggatactttggtagcattcaaatcttcctggctcttgatctcgtcatcctcatgcacctcttcatctttcttgatgacaggagcagtaaacttgatagaactcttcaaagcagggggaggaggtgcaaccggttctacgcgtttcatctcttcctgtttgatttcaggttcttccaattttgacagagtagttacttctgtcatcacttctttctgctccggagttgccaacttaagcagtgtagggatactaaatccaactgctgctataatcaccacaatcaacattgcaacattgtgtcgctttgtcgaattggcacgcattctatatgcgccgtatgcttggttcttgccttcaaaaatcagttgacaccattccgaagaagctaaatctaattttgccattttacttttcttttttaggtgttacatcaattatcggctaagttctgtgacaattcacctttcgcatcgtaattcttcatcaagaattcatcagcttctgcaatgtctgttatcacatatttaccaatattacatatctgcatttcgtccagcgcgtcaatcagattcatataagaagcatcatccgtagccttgataattacggtcggtgtatcctttccgctctttatctcggaaacctgcttcttaaattcgtcatccgtgatcttaagatcaagtttttgctgcttcaattctcttactttattgacagcaacagcattcttctgaagaagtacggcacgcagtccatctgcaccgtagctagtttctttcaacgaggtataatccttatagttaggttccccctcgtaataatagagtttgttatcagctcccagcaataacgtaattgcttgtgaagccttcaccatactcttttggttttcagttatatctttgtcattactcggcatgcttatctccatcgtctgaggtttgctcagtgtggtacaaagcataaagaaagtaatcagcaacatgttcatgtccaccatcggtgtaaagtccacccggacagtcattttcttttgcttgctctttcctctttttccgccgctctcttgtacttcagcactcattgtatttcctcctttttaattttcagattctgccttgagagaagtaatcagattgtaccgattttcccgcaaatcctgaagtgagttcataacgttctttatcactgagtatggagttgtagcgtctgccttgatagcaatacgtagatcagcgttagcggcacgtgcattacgtacccacgatttaaactgattgtcaacactatcgcatggaataccttcattctttaggatcttatcccgttgatcttccgggagatcaagatatttctgcatacttctgataggtactccaaaagtagaagacaagataaatctcttctcctgttccggagtaaacttaatgccatactcttcacccatgctctccaatacagcctgcatatcctgctgcttgtcgaggctcataaatatttttccttccggatcaaccagaatctggagtacattcgtctccggaatcttgatttccgatacggaagccggagtggtaacttgtactggttctttcttcacaaatgttgaagtcaacataaagaaagtcagaagcaatacagtaacgtcactcatagctgtcatatctatgaacgtacttttctttttaatttgcgctctacccatgattaataatagattttataagggttcgcagaattagtgagtagcagcaaaagtttgcacgatagagaatccgacttcgtcgagtccgtaagtcaatttatcgattttgttagtgtaatagttgtaagaaataacagccaatgcaccagtcaagataccgaaagcagtattaatcaaagcttcagagataccttgtgacaaagccatagagtcagcaccaccaccagcagacaaagcagcaaatgaacggatcataccgattacagtaccaagcaatcccatcaatgtacccaaagtagtgatagtagcgatgatcggaagattttgttgcatcataggcatttccaaagcagtagcttcttcaagttctttctggatagccaacagcttctgttctttaggaagagctgtgttcttttccatttcttcatacttacgcaaagtagaagttactacgttagcaacagaaccacgttgtttgtcacagatttcctgtgctttcttcatgtcacctgcagctaaagcgtctttgatgttagctacaaacttagacaatgaacctttaccgaaagcagaacgaagagcaaaataacgctcgatgctcaaagcaagtacggttaacaacaatgtctggataataggtacgatgataccacctttgtaaatagtacccaacatgttcaacgggtgattgttagggtcattgttcataaagttggacgggttacctaataagaattgaaagatacatacagctattactaaacagcagatgattacgataccggcattctttatacctacaacttgagtttttttagtagtttccataataagtttttttgttaagaaattaattttagttatttaggaagtaaatttttcaattagacacactgcgctacagaccctgcaacttttaataggtaaagtcacacggtttcatacagagtacgaaaaaaaacgaataaaaatggagaaaagactaaataaggatgcgtcttaaagcgaacacgtagtagtcgctacacgtaatggagtaatgtggatccttatcggaataaaatgatttactttgatccaatactaaagagttttctcttaacacgagaaacttttgcataacgtctttcaaggagtcattgatttcaatgattctccgcagacgataattattagagtttgattctgttacgagtttaagtcctaattctacgtcagaaacagacaaagaacggacgctatcatagctaacagactgcccatccacagaagagcgttgattgctgtcagaagataattctgataattgacaaggtgagtcactaaaaatacaagtagagaaattcatagcatttccgcttacgctaaaagatagcatcagcagaagaaaagctaatatgaatttcggggaaagtttcattgtatttttagttgtttaatcaattacaatagattcggccacaaatgtagcaattaattgtatatgtttatcgtcgttcacatcatttaaacatttaagtttaactcttttataaaaacaagctacaatatgttttgttcgatgagtttgcgacttaatatgttaaaaaaacatttcctctgaatatccagagttttaagaaattaaaaatcccctccaatattcctactgaaggggacttttcttaaaaacggcggctacctactctcccactgttacgcagtaccatcggcgtgacgaggcttaacttctctgttcggaatgggaagaggtggaaccctcgtgctataaccacctgaagaaggttatgacatgatgaaaagtaaaatttcagtgtctagaaagctaaacgtatatacccaaccggtacatgtccgaaagaaagtgaacgggcaattagtaatgctcggctttgatgttaccacctttacacctgcatcctatcaacgtcatcgtctttgacgaccctaagaaatctaatcttgtggctggcttcgtacttagatgctttcagcacttatccaatcccgacttagatacccagcaatgcacctggcggcacaactggtaaaccagcggtcagtccaacacggtcctctcgtactagtgtcagagccacgcaaatttcatacgcccacgatagatagagaccgaactgtctcacgacgttctgaacccagctcgcgtgccactttaatgggcgaacagcccaacccttgggaccttctccagccccaggatgtgacgagccgacatcgaggtgccaaacccctccgtcgatatgagctcttgggagggatcagcctgttatccccggagtaccttttatcctttgagcgatgtcccttccatacggaaacaccggatcactatgctctagtttcctacctgatcgacttgtctgtctcccagtcaagcgcccttatgccattacactctacggacggttaccaatcgtcctgagggcacctttagaagcctccgttacacttttggaggcgaccaccccagtcaaactacccaccaaacagtgtcctcgcaacaacgagttagaactcaaataatcaaagggccgtatttcaacagcgactccacaaatactggcgtacctgcttcaaagtctccggcctatcctacacatcaattacccaaattcaatgttaagctatagtaaaggttcacggggtcttttcgtcccatcgcgggtaatcggcatcttcaccgatactacaatttcactgagctcacggttgagacagtgtccagatcattacaccattcgtgcaggtcggaacttacccgacaaggaatttcgctaccttaggaccgttatagttacggccgccgtttactggggcttcaattcaatgcttctcttgcgatgacatctcctcttaaccttccagcaccgggcaggtgtcaggctgtatacgtaatctttcaatttggcacagccctgtgtttttgttaaacagttgcctggacctattctctgcgcccaactctcgttgggaccctttatcccgaagttacagggtcaatttgcctagttccttaaccgtgaatcactcaagcgccttagtatattcaacccgactacgtgtgtccgtttgcggtacgggtaccttaaagattaagtttagcggattttcttgggagtatgcttacacgcactattaccttattccgaagaatttggtatactatcaggttcgactcttatcccggatttgcctgggataatcaacatctacacccttcaacggactattccgtcagtccgcggcgctgtcactcctccgtctccacgtcactctttaaggtagtacaggaatattaacctgttctgccatcggcctcaccgttcggctgagccttaggacccgactaaccctgatccgattagcgttgatcaggaaaccttagtctttcggcgagggggtttctcaccccctttatcgttacttatacctacatttgcttttccacacgctccagcaaagctcacgcttcaccttcgacgcagagtggaatgctcccctaccgatcattactgatcccatagcttcggtaaattgcttgatgcccgattattatccacgccaaactcctcgactagtgagctgttacgcactctttaaatgaatggctgcttccaagccaacatcctagctgtcttagcaatctgacttcgttagttcaacttagcaattatttcgggaccttagctgatggtccggattcttctcctttaggacatggaccttagcacccatgccctcactcctgggatcgaactactgcgcattcggagtttatcaagacttgataggcggtgaagccctcgcatcttatcagtcgctctacctcacagtagtaattcccaaggctgcacctaaatgcatttcggggagtacgagctatctccaagtttgattagcctttcacccccaccctcagttcatccggaagcttttcaacgcttatcggttcggtcctccagttagtgttacctaaccttcaacctgaccaagggtagatcacttggtttcgcgtctactccttccgactaatcgccctgttaagactcgctttcgcttcggctgcggatctcaagatccttaaccttgccggaaaaagtaactcgtaggttcattatgcaaaaggcacgccgtcactgtttacacagctccgaccgcttgtaggcgcacggtttcagggactatttcactcttctattcgaagtgcttttcacctttccttcacagtactggttcgctatcggtctctcgggagtatttagccttaccggatggtcccggcagattcacgcaagattcctcgtgtcccgcgctactcaggataccactacgcttcatttagcttcgaataccggactatcaccgtctatggtttcattttccaaagaattcttctcactaaatttcttgcgacatcgtggtcctacaaccccaatattgccgtaacaacattggtttgggctaatccccgttcgctcgccactactaggggaatcattattattttcttttcctacaggtactaagatgtttcagttccctgcgttagcctcttgctatgcaagatgtcattccttcagaatgacgggttgtcccattcggaaatcttcggatcaaaggttatttgcacctgcccgaagcttatcgcagcttatcacgtccttcatcgcctccgagagccaaggcatccgccatgcgcccttgcttactttctttcaaacgttttattctcgtactggtattggtagtggaatgcttccttctatcaatattgcatactcgaacacgtacggtttgatatatacttttagctcttactaaaattttactttttgtacatcatgtcaaagatcgtttctctttttcagagatcgtggagaataacggattcgaaccgttgaccctctgcgtgcaaggcagatgctctagccagctgagctaatcccccaagaggttatcaagaattttgttttttagcttttagctttccctgttcctcattcttgagcttggtagtcccaggcagagttgaactgccgacctctacattatcagtgtagcgctctaaccaactgagctataggactagttcaaccttgtctacctttcgtctagactcggcttctttttctcttgtttatctctatctatacttctatagatggttgatctatatgttataaataaacaagtaccagtagtacaaaaaacagaacctttaaagtcttttagtggctgccacgttttgtgacagttacggcatcgctccagaaaggaggtgttccagccgcaccttccggtacggctaccttgttacgacttagccccaattaccagttttaccctaggacgctccttgcggttacgtacttcaggtacccccggctttcatggcttgacgggcggtgtgtacaaggcccgggaacgtattcaccgcgccatggctgatgcgcgattactagcgaatccagcttcacgaagtcgggttgcagacttcgatccgaactgagagaggtttttgggattagcatcctgtcaccaggtagccgccttctgtaccccccattgtaacacgtgtgtagccccggacgtaagggccgtgctgatttgacgtcatccccaccttcctcacatcttacgacggcagtctctctagagtcctcagcataacctgttagtaactaaagataagggttgcgctcgttatggcacttaagccgacacctcacggcacgagctgacgacaaccatgcagcaccttcacaacagccttacggctatactgtttccaatatattctgttgcaatttaagcccgggtaaggttcctcgcgtatcatcgaattaaaccacatgttcctccgcttgtgcgggcccccgtcaattcctttgagtttcaccgttgccggcgtactccccaggtggaatacttaatgctttcgcttggccgcttactgtatatcgcaaacagcgagtattcatcgtttactgtgtggactaccagggtatctaatcctgtttgatacccacactttcgagcatcagtgtcagtgacagtctagtgagctgccttcgcaatcggagttcttcgtgatatctaagcatttcaccgctacaccacgaattccgcccacctctactgtactcaagactgccagtttcaactgcaattttacggttgagccgcaaactttcacaactgacttaacaatccacctacgctccctttaaacccaataaatccggataacgctcggatcctccgtattaccgcggctgctggcacggagttagccgatccttattcatatggtacatacaaaattccacacgtggaaaactttattcccatataaaagaagtttacgacccatagagccttcatccttcacgctacttggctggttcaggctctcgcccattgaccaatattcctcactgctgcctcccgtaggagtttggaccgtgtctcagttccaatgtgggggaccttcctctcagaacccctatccatcgtagtcttggtgggccgttaccccgccaacaaactaatggaacgcatccccatcgataaccgaaattctttaataaaaatatcatgcgatattcgtatgctatccggtattaatctttctttcgaaaggctattccggagttatcggcaggttggatacgtgttactcacccgtgcgccggtcgccatcttcagtttgcaagcaaactaaaatgctgcccctcgacttgcatgtgttaagcctgtagctagcgttcatcctgagccaggatcaaactcttcattgtaaaagtattttttatcatcccttaggatgacttttttgctctgttcaggacgccgtaaatttattgaccttattcaaatacctattagtcttaattgtatcactacttcataagacaagtattgacggttctatttttttacttgtactacttgtattgtttatcaatatttcaaagaacttgttgctttcgttttaaaagcgggtgcaaaggtaagggctttatttttaactaccaaactttttcggaagtttttttagtttttctttttacgctggtttctctggctctctatgcgaaagggaaagaaggtatgaaagaataactcttgccaattttctttgcgaatcggactgcaaagataagaactttagttattataatccaaactttttcggaagttttttgttcttttctctaagtgagattccactttttcactaagtcaatttgtcaaggctttcttctcttggaaagcgggtgcaaaagtacgcccttttggtatacactccaaatatatcaaactattttttctaattatttttgaatacatttgctaaagtgctgacgcataacgatgttgtagaacatattttttatgtatagggaaattgtgcgcggaaacgacgagagggatacacattattatatcacacgcgggcgcgtgaaggcgtgaaaagagaatgaaaagaaaaagacgaaaaagaaaactacaagaaaatagatattagaaaaaagcaagaggatttagaatcaaccgtcagaatactttttctaagcggtctaacggttgactattccataggtatagatcggataaatacagagtgggtactaatcagattctaactataaaatcagaatgtcattcttttttagagttctctattcgcaggctgacaagttcaacccacttctttatgcccaaatcaaagccgcctttttctaacagatgaagggcgcccgcataatgaagggcagtctcctccctactacagcttatcttacaagacagtttacccagatagtattccagccgggccatttggatatagtccaataaagtataatcccattcgattgacaaatcaatcaactcccgtatcaaagcataggctagttcacattccgtataggttaaatccgagaggggtttgtacataacaggatgctgagtcagctgaacaacaattcgattaaagtctccgtacataggttgcgtttattaccgcatcagttcccggtggtgcgagggttataaaaaaagagagcgtggaaactatctattcatgccatatataggtatccgctaagacccctttcgtgaacatgaatgatagccccacgcccaattggatatataacaaggttatacagacaatagtgcgtgagacctgtcattcattccattcacgaaagttaaaatttagcggattttatatatgaatgtaacaaataaccgttctcaataaaattattaaaaaactacttccttcgctcgaaagtaagttatcacaaaagtagaaataaatatctattaaacaaacaattttgacaggaaaaacatgatagatcaattaattcagtctatatcgcataaaaaacacaaacccaatatcctactagaaacaatttctcattttcatttctcatattccataacatgcacaataattttctgtaaatcaacaatataacacaatgagaataaaaatacaaaacggcatttctcatagtatgacccgcattttgtacataaaacaacctatttctcataacttatcaaggtatttctcatagtattttgactatttatcctataaattctcaagctagatcctaagctaaagaccaagttgaataccagaccatgcacctatttacaatatatcatcagtgcttattggaagtatatagagcaggtatccgcatatttttctaccggcatctatatcgttccactccagtggacaggcctgtgcactagagtagaaagaaccgtccactagagtggaacgatctgttcactcgagtgcaatgatacagatagtagcaggaagaaatagcagtgagtaagggaaaacagtaagatataaggtgaatgatacacaggaaagcagtaaacaataggaagttgattaataaacgacatagggaaaggaataatcgtaagtccggcgagagtccgggaaaagctgcagccatcatgtatgagaaatgagcaaaacaaataagaaggagtatgagaataagatgagaaatgatttgaaacctatgaaaaatgcatcttttttaggggtaaatgatggaaatactatgagaaatgccatttcacagttcatttctcatagtattatatcattgatttacaaactattatcatatcatttatgagaacatgagaaatgaatatgaaaaaacaggttcttcgtcaaatttggtggtacttcttctattgtgaataaataatcttcgctctcagtagtttaattcctgccctattgtacatctgtctttttaccgctttaattttattcactgtcccctccagtaatccgttactgaaggggatatcaatagctgcctgtactgcctcccagtctttttcaataccatatgcaaagttcgtcagtgccatattccgtgttgccttcgctttttcaatccactttctaatatccttatcataagtgttcccattaatcatatctctgaaattctgacacacgcttaaaagttctttaatctgcggtgaggacttatacagttccgctagtttaggattatccgattctccctttagaatgtatttgcgtatctgattctgtgaaactctctgtattttacttctgttttcaatgctctcattatgctccttgacttccttcctcttttgttgatacctttttcgcaagctggatgttatccttccaataagtgcgccactgattttactccccattttttgtgccaatatttttcgagtaatacagcccgcactaatgattgtagccagttcggatacatgtttaagagctgtcttctgttgctcattcaagtatgcccctattcttctgttgtgaataatcttataaatgtagcgacttttcttacccaaatgtgtggctgtctgctcaatggtcatcccctgcatttttaagttcaagctttccctgtatatcttcaatttttctctgtgtcggacatctcccatgttaaatatgtcctgaagaattaacgaagaagccgtgtctctgtcaggatattcgtatttgagctttttcttggtctgacggattattttctctatttccggtatcatcgtgtccgtcatattcttgattagatggaatcggtcgcagatttgtgtaacaccaggaattattctgtttatagcctctgtgaaacatcttccacggtctctcgttatatattgtatttgaggattccggatgagccagttatcaagtgcttctccgtttctatcctctaacaaagcaataggtatgtgtgtcatctggtctacggccacactcatataatccttaccttttttataggcaaaatcatcaatacctacataaatacttttattatgcataggattgtgttgtccgcactgttgtaggatgcgtaagcaggaagaactactggctgttatatggaacagttgcaaaagagaagaggcctttcgggaagtaagttccaaacttatcgatctgatgcgttcctcaacaagatagctccgtctaccataccgacgagccagaaaagacaacggttcgcagaatattttttgtggacaagaaacattgtcacaataatatttgccaaccttgatgactaactccaaagtatgaccgtaaacttcaagatcctcaatatgacgggagtagtaactgtgcaatcggtgactgaaatgtccgcaataaggacaggaagcccctttgccagccgtatgtagaaagaccgtcaatgagccaacagcttcagagataccatcttgttgcagattatcgtagccaagactgaatctgaaatcatggaataatcccctatttgtaggagcattttctttttttgatgtatatttgtacgttgtagatatgacttgttgcattgtaactcttaatgatgtggtgtctttaaagttactaaaaagcaaacatatctacaacttttaataggattaagaaagaagaagacagttgaaataaaaaagagattaccaccaaatttgacgaagaaccaaaaaacatttgcagaagctgaattcagcggagactgctgaattcaaattgtaaatacgacacctccttatgaatcaggctgaatttatccgggtaaaatttgctctatttctttcaactcgtctgccgtgaactccaaatgttccagcgctttcaaattgtcggctaactgattcacagaacttgcacctacaatcactgatgtcattctttcgtctttcagcacccatgccaaagccatttcagccagcgtttgcccacggcggcgggctatttcatttaattgacgggcagcttctaccttttcatgcgtcacttgagattgttgaagaaaacccgaagaacgggcagcacgggaaccttccggaatgccgttcagatatttatcggtcaataatccttgtgccaaaggagagaaagctatgaagccggaaccgtactccgctgctaaaggaagtgattcagcctcaaccgcacgatcgaacatactatatcgatattggctgataagacagggaacaccggcttttgccatcatctcataggcaacacgggcttgttcgggaggatatttagaaattccgatatacaatgctttaccttgcttcacaatatcaatcaatgtctgaatggtttcttcaactggagtgactccgtcataacgatgactataaaagatatcaaaatactccaaacctgtccggcagagtctttggtcaatgctcgccatcagattttttcgagagctatttccgccataaggacctgcccacatgtcatgaccggccttggaagagataatcatttcatcccggtagccttgaaagttctctttcaagattcgtccgaaatttacttcggcacttccgggagcaggaccgtaattatttgccaagtcaaaatgagtaacaccgtgatcgaaagcatacttaatcatgtcggttgctacattgaaattgtccacactaccgaaattatgccacaatcccaaagagattagaggtaactgcaagccactcttgccacaatatgtataaggcatctgttcgtaacgatcagctgccggctgataactgaaagagttttccataaagcagaatgtttatattttcctttcacaaagaaaggaaaaatattccaattacggcttcaaccggatattaaaaagaaggcggatcagaactggaaatagataaacggctgaatctccgaactcttcatctgaataacaaggtaaatcaaagctatcatcaacactgcttttcctacgaacggtagacggatcactccccggcaagctgcattttcccagctatcgggagcaaaatgaagcaggaagccgagcaacattaatgcgaatactttccaatatccttcaagtaactgtgggaacagttgcggacggaaagtagtgaatatctgtcccagcatatccattgagttctgaaaatcggcattacggaagaaaatccagcagaagcagacaaaatggaaagtaataaccactccgaatacacgccgccaaccatgactttgttctcctttcttacgcccggtgatggtcatccacattttatgcaatgctaaagcaactccatggaaggttccccaaagaacgaagttccaagatgcgccatgccataatccacccagaaacatggtaatgataagattcagatattgccggaacttaccttttcggtttcctcctaaagaaatatatagataatcccgcagccaactagacaaagagatgtgccaacgacgccagaattcggtaatggaggcagacttataaggagaattaaagttgagattaaaatgaaagcccaacaataaagcgataccgatagccatgtcactatatccggaaaagtcgcagtaaatctgtaaagcataaccatacactcccatcagattctcaacacccgaatagagagtaggattatcaaaaatacgttctacaaagttgatgctgatatagtcggagataatggctttcttgaaaagaccggatacgatcaggaagattccgcggccgaacatctcctgcgaaacaaagagaggtttccggatttgcgggataaaatcgcgggcacgcacgataggtcctgccaccaactgggggaagaaagatacgtagaaagcatagtccaaaagattcgtcaatggctttatgtccctccggtaaacgtcgatggtgtagcttagcgactggaaagtaaagaaagagataccgaccggcaggaatatatcaagggcggtaaactctcctcccatcaatgacgctatcactccacccaggaaattggtatatttgaaatagacaagaagtcccagattgatactcagactcaaaactactaatcctttacgtttccaatacccttctgcacgatccattagctgtgcaagaaagaagtcggcaacggtgactatagcaagcagaaagaagtatgtgccgctactcttgtagtagaaataataggaaaagagggtgacaaacaagatgcgggcagtgtatttacgttgtaacaacacatacactaccatgaaagcagcgaacagccaaaggaagataccgctgctgaatatcatcggggcttgcggatcgtaggtaagtacctcttttagtctactgaaatctatatcaatgggaaacatagtcattatatgcttgtataagtgcttggtataataaatttccttgcaggatgtatccttcaggtaaataatgtacatgatcgggacgcatcaggtttgcctccgtccagttggtgcaggcacgacgcttccctccgactacatcatacatatcccacacgagcaggcgatggtctttggcataacggcggatagtttccgctgctgttgccgtacggggattgatggcatacgtgcgtctacgcctccgttgccggaaactttcataggaaccgggaggggtagtcagaagaatggggatgttaggaagactgtcgcgcaacagtttcacaagttcatccatctgattgtagtgcacatttatattataacgccggttatggctttcattggttccgaaagagagaatcagcaattcgggtttcaaggcagcgatttcggtaatacgatccggatgggtaaatgttaggcaagtagctccgttgacgcctttatcaatataagaaatggcaccaaaggtttctgccaaacgggcaccggtggtttggggatagatatgtccacgcacgtggctatcgccaatatgaacgatgcggactgtatcttcggagagtccggcacgtacctggcggagatgttcaaagacgggagccagcagagcaatgctgtcaataatctcattccgtccggtttcgcgaaaagcagcagggaaggctacttgtacgttgatcgtatcattcgcccagttcatttcccgtaaaggctttatccgctttgcagtctttcccaatggagagcatacaggcatacggtcttgcgcgattgtttctgtaagaaaacaagggacactcaacataccggcgagaatgagaataaagatggacagcaggttactctttctcataagcacgcctcctgtcgtattgttccttaccatagatcatggtttcataaagcaatccagccaaatgcttaccgccacggaagtttatatgcgtataatcgtagtttgccatagagggtttggcatggacgagttttgccatactgccttctccgcccattgcttcaaacatattccagaatgcaataccgctttcagcagcaatgttctgctgataacgaatcagattcttaacaccgggcatggtacggagttcgccgttttcgttcttataatcacggtcgccaacgctcaataacagaattccggcttgtgggaaacattctttcagatgctcgatagctgtaatcaatcctttctggtaattatcataattgcgtccccgttcggtagctacattcaatccatattcgaggataatcaggtcgtaaggacgctggcggttaaactgcttcaacgtttgtaccggaataccgcgcagggaaagaccggaactgccacgcaacgagaagttatcgagaatgattcctttctttccatccattgccaagccatagaacagggcagagtccgcacgatctactgtccaacggatagaaccgatgcgtccgtccacctgaacttgttgtaatccatcagaagggcctaaagagtaattcttgctttctcctttgttcacacgggcagaaagaagaacggaatctttattatagaagaagatagaagcacgttggcaagtatcgagcagggaggcgtatttattttgtccgcgtagttctacataagctccgttccgggggacaaaatagtgtccggaaatgccttgtttcttcttatcgaaatagatactgtctgttactgcatggctggaccatccgccaaatgtatgccgtaccgtaggacggtaaccgcttgtcatggaagtgatggtaacaaaacctacaccacaaccgccgaattgtttctgaagcatttcgcgcaagtcggctgtaaatatatccgcttcgataaaagagtctccgaatacggcaatgcgtacctgtttgtcatcagagtcatctgaatcactggaagagatacgattgagtgcttcataaaaaggagccatcccccggagggtggaatcactgtaatcttcaatgcaagtcatacctgcacgacaagtatctacaaagaccggctttacaactggaggcaaagggatactgtccgaatcagctgtggcaatctccgattccggataacgaaggtcgctcaaaaggtctacacgcctcatcgtgtgcccgtcaatggtcagtaccggaagccaatgaagcccgagtaaggctgcaaatacaatcagtacgaaccacaacgaatatttcaaataattctttattatctccataatgtttctaaaatcccaaacgaccgcaaagatagacaaaagccacaaaaagaaaggagaatctacattatttattagattctcctttcctttttatctatctaccggatcacatttaaatggtccgttcaatgttccacacaaatgcacgcaaacctaattgttccgtctgcaaatccattttatgcaaggtgtcgagcaatgaatcgactttgttatcttctaccactgtcaggatagccgagcacatacttggccaggcatggcttccgaaatgcggatcgcctgttttcgaaccacgtccctgtactttttcaaggtatgtaaagccacgacaacccaaacggtcgagcaacgccatgattcgttcgtaataagcctggtcgaatgttatcaatactgatttcatatttcttttctgttatttcttaataatgttatctttattcgcctggaaataaacgtccaattcacgttgacggcggagtttacgacgacggttcttgataccagttcccgcgaatacacaatatagagtaggaatcaaaatcaatgtcaaaacagtagatatcgtcaaaccaccgattacggcaattgccatcggactccacatttccgaaccttgaccgccaccgatagccatcggaatcataccgagaacggtagtagcggtggtcatcagtaccggacgaagacggctcttacctgctgttaccacagagttcaaaacagccaatccacgttctcgacaaagggtaatgtagtcaataagcacaataccgttcttcaccacaataccaatcaacatgatacctcccaataaactcatgacactcaatgtgctgttcgtaaagaatagtgccatcaagacaccactaaacgcaaacggcagggagaacatgatgataaacggataagtcagtgactcgaactgcgctgccatcacgataaataccagaacaacaatcaggatggcaagtgttcccaaatcgcggaatgaatcctgctgatcttcgtacgaaccggaaatctggatggtgacttctcccggaagatccattttatctatcaccttatttccggcagccactacgtcgcccagcggagctccggagattacagcggaaacggtcacgatacgttcgcggtctttacgttcgatggtaggaggtgcaaaacgttcgactacctttccgacgtctttcacacgaacggattgtccctgtgcattgtaaatgaggatattttcgagactctccaggcttgtacggtattcaggtgcgtaacgcactttgatatcatattcatctccgtcctcacgatatttagatgctaccgcaccattgacacggttacgcagatagttaccagcagttgaaagattcaagccatgcatcgccagtttttcacggtcgaagtctacctggtattccggttggtagtcactacggctgatatttacctcggtcacgccttttactttcaataattcacgtttcagacgggctgctacgctatcggttactgtcatatcgtatccgtaaacctcaaagtcggcacttgcctgcgcggacatacccgtgttactacctccgaggattacctgtgctttactgaattccggataggctttcaaatcttcacgcatctcatcacagactgcttccaaagtgatgtcacgatcacccgggtctaccaaactgatgttgaacgagattatatgtgagccattgtcctgcatggatgcccaagtgttgtcagaatcagcctgaccgactgtatagttacagactttcattatgtctttatacttcgtcagccattggttggttaacttctgagataattcctgcgctatctcttttcgtgtaccgattggaagttccaactgtacggcaatacgggcattatcctgtgccgggaagaactccgtaccgatgccctttgcacacagcaaactgacaacgaagaaagcaatacatcccacaatcacaatcggacgatgacgtacagcccagttcaacatcttcgcataccaagtatcaagtccgtcgagcgctttctcaatcggagtaaagaagagcttgaacattttcgatggtttcttctgcaagcgaagtaactgagaacagagcatcggagtcaaagatagtgcggcgaccgtagaaataaacatgatggcacacatcatccaacccaactgtttgaaaagcacaccggacataccgcttaccatcgtcaacgggaagaacacggcaatcatggtcaacgtagaagcaattacagagattgccacctcatttgttccgtgcacggctgcctgtttcggatcggagccacgctcgatatgggtcgttacgttttcaagtaccacaatcgcatcatccaccaccataccgatagcaatagaaagtgacgaaagcgaaataatattaatcgtatttccactaatcgccaggtaaatgaacgaagcaatcaacgaaagcggaatagtgatacagataatcagcgtcgcacgccaacgtcccaggaagaggaacacgacgatgacaacaaagagcaaggcataaacaacggtttccgtcaaactgtcgatggtgttcaaaatgttgtccgaggtatcgacaatgacaccaatcttcacgtcgctcggcaggttcttttgaagcctcggcagcgcgtcggccactttcttggagatttctaccgaattggctcccgactgtttctgaactacaatcatagcaccttgcacaccattattataggtttcctgtgcacgttcttccacggtatcgacaatacgggctacatcacgcaaaaagacattcgccccattgtgtgtacccaccactacatctgccaactgacgggaatcatcaaactcaccttctacacgcagtgcataggtttcgctaccaatatcgaagttaccaccgggaatgttcttattctcggctccgataatggagctgattgtttcaatagtcaggtgataggcttccagtttgttagggtcgcaatatacctgaatctcacgttgcggtgcaccactgatggagacggttccgactcccggaatacgtgccagcggatttaccacacggtcgtccaatatcttataaagcgctgactgactctcattggcctgtacggaaagcaacacgatcggaatcatgtccgtactaaatttgaagatgatcggattctcgacatcatcgggaagctgtgagcttaccatgtcgagtttatcgcgcacatcattggtgagaacgtcaatatcgttaccaaactcgaactccaatgtaattaatgacatattctcggaagaacgggaggtgatatgtttcaggttgctcaccgcattcaacgtattttcgagcgggcgagtcacattattttctatatccgaagcacttgctccgggataagcggtcattaccatgattgtattcgtgtcaatgtccggatacaagtcgataggtaacttggacaaagagaaaagaccaaaaatcaccactgccagaaagcagagggaggtcataatcggtttcttaaccgcaccttcgtataaactcatgttgttttatttaaaagcctctccccgctcctctcccaagaagaggaagccggaagatcgttttgaaatcaggttaattaataaaagcattgggagaaaggtactgtacatctctcatttggaagaaagttgggaagaggcttccacctctacttccataccgttcaccaaacgtgactgtccggcaactacaacctgtgagttatcgggcacaccggatttcaactcgtactccgtacccatgcgtctacccagttcaaccttattataagatactttaccgtctttataaacgaatacataacggtcgccggaacctgcctgcttaacgatagccaaatcaggaacaactacgttttctgctgtaccgaagttcaatgtcgcacgggcaaacattcccggacgcacacgctggtctttattatccagtctgatctccacctggaatgtacgggtagtagcatctatggtagggtaaatcaggttgatggttcctgtaaagacttcatcaccatatacatcgagtttcacgtcgacaggagtaccttttttcactttcgtgaagtaggtttcagacacgttaatcaggagtttcacgggagtgatctgttctactaccagaaccggttctccaccactgtacatatcgccattatcatagttgcgcgcagtgactacaccattgatagggctttgcaaagaggtattctccagcagattcttataagcggttttcttcacatcgagttgcatcttcgaagcatcccactctgatttggacgcaccgcccactttatataattcgtcgatacggttgaattctatttcctgattatctagttgcagcttcgtctgtttcaggttggctgcatccatctgcacaagtttctgtcctttggatacgcggtcgcccacttctacgaaaatctgatcgatacgtacgggagacgaaggcgcaatattattctttacttcggcttccaccgttgctgtgtaatcctgtatttgatctacggggcgggcttttacgtctgccagcttcacaataggctttgcgtccacatgttccgcagcagctttgtcttttccacctgtacatgagcccataaacacagttaacagcagggctaccaattggatacttcttttcatattccttacttgtaattttttagttgtctatctttattcttttcccagaacctgatcgaggtctgccttagcaaccaggtaatcgtatatggactgattgtaggtgagttgcgcctgtgtcagtgacacttgggaactgttcagttcgagcaccgtgcccttacctacatcataacgtttttcggcaatcaccaccgctttctttgcctgcatcacattttccttgttgctgactacctgctctgtgctggcactcatattattgcgacaactgacaatctgcatattcaactgtctttccgtatcgatacgattccaatcgagctggcgcatctggatacgggcagatttcactttcgtaaaattgcttgccttatataaaggtatgctgatattgaacatcaggctggaactgttgctccagttataatcgaagaaattgatattcggattatacaatgactgatattgataggagaagctcatggaaagagtcggcataaagtttgtctttaaagactttacattcttttcgagcaacttcatgttcaagtccaactgcttcatggtggtattgttgttcagattcacattctcttctttcaactgattggcaaacatggtcgtctcatagttggtcagattatcattaatctttatctccacatcggcagtgatgcccatcagaacttttaactgtaatttagccaaagtcaccgcattggctgccgcaatcaggttcggcttaatgctgcgcatctgtacttccgcactgatcttgtcatattcgctcacagttccctgctgatatttggcattcactacattgtaattatcttctgccagtttatagctgccttgaagcacttcatagctatcctgtgcaagcattaactgataataagccttgcttacctgattcaccagatccagtttggaagcacgtgacttctctactgccagttcaatatccgtctttgtcatcgacatagcacggtaaacacccggcacaaagagtggcaggttaatactcaacccggcattggcggtgttcgaaccgtcttgccccatcttgaacgacatatcgttcaatttcatttcagccgctttaattgtatggtctaaggaaccggcaatgctggcctccggcaacagactttgccaggcttccttgctggcaactctctttaaggcgatttcttccgctgccactttcattgtcggattctcatccaatgcaatttccaaggctttgtctaaggttaaggttagggtattcttctccgtctgcgtgtcctgcgcctttgcaaaaccaaatgcacagaatgccacagctaccagaaggatcttccgacctgtcaatcttttcatcttgttcataaactgaatttctaatttaatcttaattgtttgtcaatagaacctcacttttactctagtcttcgatgcggttcttgcgatattcttgtataaagtcttccagtacccttgctcctttttcggtggagataccgcgtatataagtaaacatgatggattcgtacacttcaatgaaagggtattcattacagatgtccgtattcaaaagcacatcaaattgctcacgtaccagcaaattgacaatagcgaagtttacatccgaacgaaagatgccctgctctactcctgttttgaagaaggacatggttttcatcgaatcgctgtcctgccgattcttcatcatctcatatactttgggatatttcttaatgtcttcaaaaaagcgtttgttcgtctgatgaaacatctcaatgcttttctgaaagactgcaagtatcacttccaacacattgtgcgactgttcaaagactttctgcaaatacttgtctctgtctgcctgtgccttcagtatgcattctttcaacaacgattctttatccgaaaagacttcgtagagcgtacgtttggaaattcctaatgctgctgcaatgtcatccattgtaatactcttgatgccttttgaagtaaaagcttctgttgccgccgttatgatccgttctcttaactctacccgttgggaagcgtcctttccatgctctgtcatcatccgtttttctattttattaaaatgcagttttcgttttctcttcatttccaaaggaaaaacggaacaaagatatatagaaaactcaattaacaaattaagtttccagctatttatagtccatttgggatttattatcattcaatagagtgaaatgaaaacaagtgttaataggaaatttggaacaaacacaaaagaaaggtaaaaggagggaatataggaagtaaagttttatcgctaatagaagagatgggagccaataaatgccggataaatatcgataagaatcgacacttacccggcaataacagtcaccattattaacgaaaagcgaaaaagggtcaatttattgtcagtattcaatctgtgtcctcttcaggaaggcgactgttttatgtatttccttgtacatcacaatgtcatcttttacaaaaggcacttctttccgataggcatggaggaaacgctcaagaacgggagaggttttctgcgggcggcggaagtcgatgccttgtgcggcgttcatcagttcgatggcaaggatatgttccaggttgtccatcactttatagagtttggtggcggcattggcacccatgcttacatggtcttcctgtccgttggaggagactatggaatcgctagaagctgcatagcagtacattttattctggctgaccatggaggcggcggcatactggggaatcatgaatccggagttcagaccggggttagctacgagaaattcaggtagtccacggagtcccataatcagttgggagacacggcgttcggagatatttcccaattcggccagggcgatggcgaggaagtcataagagatggcaagcggttgcccgtgaaagtttccgccggagatgatccggtcttcatcggggaagatggtggggttgtccgtgacggaattgatttcggtcagcagtacggaggcaacgtagcggatggcatctttggtggcgccatgtacttgtgggatgcagcggaaggaatagggatcttgcacatgttccttgtggcgttcgattagttcgctgcctgccagtagtttgcggaaggcttcgcctgtctcaatctgtccctgatggggacggatttgctggatgcagtccataaacgggtcgatacggccgtcaaaggcttcgagggaaagggcggctatcaggtcggcctttttcgagaggcgaaaggctttgagcatagcaaacacaccgttggcactcataaattgggtgccgttcagcagggctagtccttctttgctcattaatttgaccggttcccagccaaactcgtcgagtacgctgatggcttcgcacttttttcctttatagtagacatcaccgacacctatcagaggaaggaaaagattggcgagcggtgccaggtcgccggaggctccaagggaaccgcggtcgtagacaattggcatgacgtcattattgaaaaaatcgaggatgcgttgcacggtgataacttgtacgccgctatgtcccaatgagagggcgtgggctttgagaagcatcatcagtttgatgatgacggggcggatttcttcgcctacgctgcaagcatggctttttatcaagttctcctggagggttcccagttcatcgggagatatatttttagtgcatagagagccgaaacctgttgttatgccgtataatggttcttcggaagaagctattttttggtcgaggtagtcacggcatttctggatgcgtaacttggcttcgggggctagttccagtttcaggttttcgtttataattcgttcgatgatttcgaaggtcagtgctccggaaccgatatggtatacattcttactcatacgcgcaggtcttgatttacggcatccaacaattctttttctctctgacaggcggtttgctcgatggcatcggcttcggtttgcagctggaggacaaaatctctgtctttgagcgaaccgaggttgatacggacattcagtaaggctcccaatacggcggtacgggcggacatcattgctacacaggcatctgtgacagcattccggttaccgagacgggcaacatctgctataacggacatcatatccagtgctttgcgggctacttccaacggaacgagggcggcttgtttggttgccttctggatagcagcacttcgggcggctttctcttcgtcggttgttttaggtagtttaaagcaggcaaatacttcgttgtaggcagctgaatctttgtcaataagcgccataaattcgtccagcaaacggagggtgatggtttgtgcgtgctgcattacttcttcactgacttcgtatcctttttttcctacggtcagccgtgccaccatcgtagaaagggaggaagccagcgctccattcaaagcggcaatactaccgccaccgggcacagggtcactgcaagctactttatctaagaaatcttttacggttaaatctgctaacatggtattctgttttttaagtgattaatgaatgagagtttttcaactattaagcgacgggataaagtatgccgcctttaatagtcatgattacgcaattcatgcctatatagtaaggtagaatatgatagttgtcggaattgagaatgacgaaatcgccttgtttacctacttcgatacttccaatacggtcggctcgttgaagggcggcggctccgttcagggtgagagcagtgatggtttcttcgatgctcatttgcatatagatgcaggccagagcaatggtcagcgggatggaaccggagaaacaactgccgggattcaggtcggtggcaagtgccacagcacaaccgacgtcaatcatttcacgacctcgcgcgtagggttctttcaaggcgaaagctgtcagaggcaacagggtggctactactccggcatcggccattgcacggataccggcatcggaagcgtgcaggagatggtcggcagacagtgctccgagttcggctgccagttcggcaccgccgagagagacgatttcgtcggcatggagtttcaacaggaaaccgtgctctttggctgcctgaagcaggcgacgggattgttcgatagagaaaacgccttgttcgcaaaagacatcacaacattctgcccacttaccggaatggataaggggaagcatttcacgaatcaggaaatcgatgtattcgtcgcttctccctgcatattcttcgggaagggcgtgggcgccgaggaaagtggagactatatcgacgcgtttatgctcggcgttattcaggctgcgcattacttttagttgtagtaattctgtgtcccgatccaggccgtagccacttttaccttctacggtggttactcccatggtgctcatcttcttcaggaagctttcggcggctgaacgaagtttaaggtagttcatttgccgggtggctttgacggtacttgcaattccccctccccgctccatgattgacatatagctttcgcctttcagacgccaggataattcttcggaacgttctccgccaaatacaaaatgggtatgggagtcgacgaaaccgggtaaaaggcaatgcccgcgagcgttataatgccaatagtgctggtagtaaccatcccgatcttcaccacggttttcaccaacgtaggtaatgattcctttggtcacttccacggttccgttttctatgatttgcagttgagacatttcctctcctttacgggcggaaaagccgatgggggttacgatacgggcgttaaatatgattaggttttcactcataaatagttcatcataattagttcatataataaatggagatatgaatggcgcgttcttttagaatgatgtttgccataaagcaattgtgattcattctattttcttattgactattccatgatacgagcttcgagaacttgctgcatggtaaagttttcgagtccgagatagtaggaagcggtatcaatcagagcttccatcggtacaagaccgattatttcactacctacaattgtaacaccgtaacgacgggcttcgatacgtactaattcgaaggtacggtagagtgcggtacgggtatagtcggtcatgttaatggatacttgggtaatgtttcgctctttcagttccactcccattgcttttacataacgaagtcctccattgatatggcggatatttttcgctatcttagtggctatctccatattatctgtacttagattaatattgtaagctacgagtggcatacgggctccgattgctacggtacctgcggccggatgtcgttcagcaggtccgaagtcaggttgccattcgggtagtttgatcttttcggccattccttcaaactcgcctttacgaacggaggcgagattttcccggtgtggcgcagtagccgacttttcatacaggaagacgggaagattatatagctccgcaactttcgccgctacttttttagagagttcgatggcttcttccatactggtgttcttaatcgggatgaaaggaattacatctaccgctcccatacgaggatgttgcccggtgtgctgattcaggtcgatcaaacggacagctacaccaacggcttcaactactgcttcacacagtgcttccggctctcccacaagtgtgacaaccagacggttatgatcttcatcattactgtaatcaagcagttttactccggctttactacggaaaggggctactatctgatctattttctccaaatcacgtccctcgctaaaattggggacacattcaataatcttattccaactcatatcaaatatctattattatagaggttatactttactgaataactatatgttttacatcaaatagccacatggtttatccaaaataacagcatgttcaaactgttccatatattgtgggaatttattccttcacattatgggaacgctttctcttatattgtgagactactttcccacaatagatggaactatcttctttattaattcttcgttcgccacatacggcattgttatctgataatctccagcatgggactcattaaatgcttcactcgtttccatcgcatgcggattacgcgcccacgaacggcgggctactcctcccattacgtcccaaagcattgccgaacggagtatttcatctacccgttcgctaccgtcgcataccataccaaaaccgccattgattgctttgccgataccgactccacctccattatgcaaggctaccagactcatcccacgggcacaatttccggcaaagcattgcacagccatatctgccatcacattacttccgtctttgatatttgacgtctcccggaaaggagaatccgtaccgctgacatcgtggtgatctcgtcccagcataatagggcctacttcaccccggcggaccatctcattgaaatggagggctatcttcattcttccaactgcatcctgataaagaatacgtgcctgtgtacccaccacgagttgattcttttctgcatcccgtatccaattatagttgtccagatcctgaccgcgccgattgacgtcaatacactccatagccgcatggtctgtttttatcagatcttcgtgtttaccactcaagcagacccacctgaacggaccgtagccgtaatcaaagagttggggtcccataatatcttcgacataactcggccagataaatccgtctttttcatcaacaccattataggagatttcttttactccggcatcgtatatggctttcatgaaagagtttccataatcaaagaaataagttccgcgggctaccaatttcttgatgacctcgaaatgacggtgcaaagatatgtctaccaagtgacggaattcctccggcgattcgtgaagaaggcgtgtgcgttcctcgaaagtcagtccggctgggcagtatccaccttcgtaaacggcgtgacaggaggtttgatcggataatagttcgatcaaaatcttttcacgctcggcatactcgagcaggtctactatattcccatgataggcaatggaacaaggttcacggcgtcgcattgcttcagctgccatccggtatgcttctatgatatctgcagtcacatgccccacccatccctggcggtaacgtgtttcaatgcgtgaacgatctacttcggctatgatggagactgctcctgctatttcggctgctttaggttgtgcaccactcattcctcccaaaccggaagaaataaataagtgtccccgcaaatcttggtcttgtggaatgccgagtttcaatcgtccggcattcaggagggtgttgaaagtgccatgcacaatgccttgaggaccgatatacatccaaccaccagctgtcatctgtccgtaattggcaactcccatctgggcggcaatatgccaatcatgttgattgtcgaattgtccgatcatcatcgaattggtaattataacgcggggagcatcgggacgggagcggaaaagccccaatggatgtccggattcaataaccagtgtctgttcctgggtaagttcttccagatattgcttaatcagtcgatattgcatccaattttggcaaacttgcccggtttcaccataagtaacaagttcgtagggatataaggctatatcgaagcaaaggttattgtcaatcattacctgaaaggctttgccttcaatacattgcccctgatattcatcaatcggctttgctttcaagtctccggcaggacggaaacggtatccgtaaatccgcccgcgagtgcgtagttcttccataaattcaggagccagttgttcgtgccactcggagggaatataacgcaaagcgttttttaaagctgtgatggtctgcgccggggtaagtgtataaccacggtcgggagctctccggataccttctacaaaatccggataaggaggtagcgtgttgccaagagttattctcataataaacagaattaaggattacaaactgtaagcaatacagtcttataactcttcgcaatatagaaaaaaagaagataaaagacaagagaaataacagatttattatcagaaaggcattattacatttactgcttaatagaatggtaagatacaggcaatgtcaggagtctcttatgcttttatacagatacaaatgcaggtcttttatccaaacggactaatagggcttttattaaaatggatagcggatttttccattaaatcaaagctatgagttctgtgttatttgcataatccgcaccctaatcatatcactatgaccatgattgtattatgaacatactctttctctgctataccaacagagatcgacaaaattactttttttgtttattccgcaactccaacaaatatttaaaggtatgcttcgcctcctgactatcatctttcaaatatgcctgtttcagttccggataattcttcaataattgaagcattttatcttttcctagaaaatcgacttttcctgtttcaccatttagctcataacagacgcgtttcgtaaccaaacttgaagcggcaagagcatcgccaatattccctcccagttttacgtcatcctcttctacaaagtttcctccgataaccgaacctagaggcatggcacaaaaatagatatttttacccaattgaacggcaggggcataccatgctccaaagcgtaactttttatagcgcaacttacgacaattcaaatataaatctcctttttcgtcacgcacggcaaaacaacgcttcttcaagcgtcgacacatcgactcgtcatcaccggccgttatccggtaatcagcccctcctgtcaatacaatctgatttctggaacgtttttctacacgcaacacggctgttgtatcaccatgttgagccagcaactctttcaggttggaataaataatattctgcgcaattaacggaaggctaatcacgcttatcagcaaacataagatacatcctttcttcataagcatcctcctttcctgtctaacgccttttcgagtggaaagttataaattttagcggataaatgcaagaatgaggaaagaaatattgaaaaaaagctgctaccaggaaatgccccctactcttattaaacggaaacagaacttatataccccattccttacagctagtaaaggcattatccagacaagtcataatatgagcttgttattcctttctatcttccgttaataaacagtaaatctgctctcgacaaaaacaagctcttatcccgaccgtcatgaattatattacctttgtggaaaagaattaaatttgtcatggaaaaacaagaacagatcattactacatatcagcaaatcattcagaaaacagagctggagttacagaatgcacggaaacgtatctattatatcagtcttctccgcctgatcttattcgtaggagctgtagcaaatgccattatcttttggtctgatgggtggctatgtctctctgctttcgctatcttaccttttatcttattcatctggctggtaaaacgccataatttctggttctaccgaaaagactttctgaaaaagaaaatagaaatcaatgagcaggagctacgtgccatgcaatatgacttttctgattttgatgatggaaaagaatttgttaatccatctcatctctacactcttgatttagacgtatttggcgaacattctcttttccaatacatcaaccgcactgcaacgcctattggcaaactgcatcttgcaaactggttcaatgcacatctggaaaacaaagaagctattgaacatcgccaggaagctatacatgaattgtccacagacttagaatatcgccaacaaatccgcttactcggcttactctataaaggaaaacctgccgataccaccgaaatcaaagaatgggcaaacagtccaagttattatcggaagcgtacacttctacgcatcctcccgacagcggtaacgatcattaatttcttatgtataggtctagccattttaggtattatctcggccagtattgcaggaggagtgtttgttggctttgtattattcagcactattttttctaaaggaatcactaaactacaaacgacctacggagaaaagctacaaattctttcgacatacgctgaccagattcttctcactgaacagaaagaaatgcaaagtcatatactgcaaaagttaaaaacggaacttacaagtcagaatcaaaccgcttctcaagcagtacgccagctttcaaaactgatgaacgcgctcgatcaacgaagcaatctgctaataagcacgatactcaatggactgatattctgggagctgcgccaagtgatgcgaatcgagaagtggaaagaaatccacgcatctgaccttccccgctggatagaaaccatcggagaaattgacgcttattgttctctggcaacattcgcatataatcatccggattacatctatcctaccattgctgctcaatctttccatctgcaggctgaagctttggggcatcctttaatggatcgcaacaaatgtgtacgcaacggaatagacattgaaagacgtccttcctttattattatcacaggagccaatatggcaggaaaaagcacgtatttacgtactgtaggagtgaactatctactagcatgtataggggctcccgtttgggcaaagcggatggaaatatatccggctcgcctcgtcaccagccttcggaccagtgactccttaaccgacaacgaatcttatttttttgccgaactcaagcgacttaaattaatcatagataagcttgaagcaggagaagaacttttcatcatccttgatgaaatattgaaaggtacaaactctatggataaacagaaaggttctttcgccctcatcaaacaattcatgcacatgaataccaatggcatcatcgccactcatgacttgttgctaggaactttagtggactccttcccacaaaatatccggaattactgtttcgaagctgacattacgaacaacgaactcaccttctcttaccaaatgagaaacggagttgcgcaaaatatgaatgcctgcttcttaatgaagaaaatggggatcgccgtcattaacgactaatccccattccttgtataaaaatcaaagttttctattgtagtaacatccaaaacctgctttatttagtagcagcaaactgaatataaaacttcaagctacctgttttaatgtgtcggaaaaaactaagtcaaacagattttgtagagatacttttactgcattttactttttgtcagaaacgctattaccgctgaagcttgttcatcagtgaaatactgcactgacgttattggctgatatgtataaggtataaactggaataactgtacagctgcaaactttttatcagcagaaagtattacatccatacgtatattaccactagcctcactctttatatgcgaacctgctgagaatgaacccgaattcacaagattcctcaaagcatccatgtgtttcaaatcaaagaatatactatgctctttagccacacttttggttggcaaataaataacttcttttgatttccagaagagacggaaaatccccataaggaataaacctgttcccagaaccatcaaagccatactaaccgtagaagacttatcatccaattcgaaagtggaaacaaaagctaaaataccgaccaataacattacagaagaaattaaaactcctgaaacacttgtacgttttgcgatatcggggtgtgaagatgcgaagatagtagcatcaatcgtttgagtagttgccataatatttaaagtttaaattattagtaaaaatataaagataaaaaggatatagtcaccggtattacagaagataccagtaaccacaaaataaacaataccaataaatagactactaaataattatacgcctcaaagtatatacatagtattcacttgatggctggcaataataggaagttgttgtaccataaatccgcccccagtgttgtgaaagtgagttatcacgatcagcacaacattgtagcgcattttttaaagaaaagaaatattctccaagttgtacacgttgaatacgtgttacagatatctgatggctttgcaagttgttcagttcagccactggcttaccaggaagatccggtgcgctgatttccccatgctgtctcattgcatatgtaatagcacgctcctgttcatccaccactttcgcagtagaaacattgcctgctatgctatgaaaagcaacagtcagcaacagaaacaatattacctttacaaattttgccatattcacctgcaaatataacagattctctctatgaaaagttctattaagatatattttaatgtatcttagtattagtaaacggcagacaaacaaaaaaggctacctgtgagggtagccttttttatatctataagaataactgtaaaattattcagctgattcagcttttggttcttcagccttaggagcttcagttgcaggagcttcaacagcagcaggagtagcttcagcagctttcttcgaacgacgagtacgagtagctttcttagcaactttttccttagccatgttttcattgtagtcaaccaactcgatgaagcacatttctgcattgtcacccaaacggttaccagtcttgataatacgagtataaccacccggacgatcagcaatcttaacagagatttctttgaacagctctgttactgcaatcttatcttgcaagttgctaaatacaacacgacgagagttcgtagtatcttctttagacttagtaatcaaaggctcaacaaactttttcaaagctttcgcctttgcaacagtcgtagtgattcttttgtgcttgatcaaagagcaagccatgttagataacatagcgcttctatgagaagcagtacgacctaaatgattgaattttttattatgtctcattttttattctttatctaatttatatttagaaatgtcggttccaaacgacagattcagactttccagcaaatcatcaagctcggtaagcgatttctttccgaagtttctgaattttagcaggtcagttttgttgaattgtaccaagtcgccgagagtttctacgtcagcagccttcaagcaattgagggcacgaactgacaagtccatatcaacgagtttagttttcaacagctgacgcatgtgcaatacttcttcatcaaactcttcattgccatcagtatcattactttcaagcgtgatcttctcgtcagagaacaacatgaagtgataaatcagaatttttgcagcttctttcagcgcttctttcggatgtatagaaccgtcggtactaatttcaagtactagcttttcgtagtcagtcttctgttctacacggaagttttctacagcatacttgacattacgtatcggtgtataaatagagtcgattggaattacattaacatccgtgcaatactcgcgattctcatcagcaggtacataaccacggcctttgttaattgtaatatcaatctgcatagttgacttagaatctaaatgacaaataactaattccggatttaacacttcaaatccagtcaaatacttacctatgtcacctgctttaaattcactggaattctcgacagtgatgctcactttttcgctctcgaactcttcaactacttgcttgaatctcacttgtttcagattcaagataatgttggtaacatcctcttttactccaggtacactagaaaattcatgctccacaccatcgattctgatagtagtgatagcaaaaccctctaatgaagaaagaaggattcggcgtaatgcattacctacagtaataccaaaacccggttccaacggacggaattcgaatttaccgaatctggagtccgcctccaacattaatactttatcaggtttttgaaatgctaatatcgccatgaaattaattattatttagaatacaattcaacgatcaaatgttctttaatgttctcaggaatgtctgctctttcaggtatgtgcaacattttaccaaccttagaagcttcgtcccattccaaccaagcatacttgctatgattgaaacctgcaagagaattagcaattacttccaaagatttagatctttcacgaacaccaatcaattgtcctggttttactgcaaatgaagggatgtttaccacttcaccatctacagtaatgtgcttgtgactaaccaactgacgagcagcagcacgtgtaggagcaattcccaaacggaatactacgttgtcaagacggccttccaacaattgaaggagtacctcaccggtaatacctttagcagtagctgctttttcaaacaaattgcggaattgtttttctaaaactccataggtgtatttagctttctgcttttcacgaagttgcacaccatattcagaagtttttctttttcttgaattaccatgttgtccgggaggatagttcttctttgacaaaactttgtcagctccaaagattccttcaccgaatttacgggcgattctcgattttggtccagtatatctagccatttcttttaaatatttaattgtttattcatgaacttaatttgttgcagccgcgattacagagagaaattaaatgtaatccaaaaacaaaatcaagatcattgtgtaagttaaaggtaaattaaactctacgtcttttcggaggacgacaaccattatgtggaagcggagtcacgtcaatgatttcagtaacttcgataccagcaccgtggatagttctaatagcagactcacgtccgttacctggacccttcacatatgcttttacctttctcaggccaagatcgaatgcaatctttgcacaatcctgggcagccatctgcgctgcataaggagtattctttttagaacctctaaatcccattttaccagcagatgaccaagagataatctgcccttcactgtttgcaagagaaacaataatattgttgaaagatgaatgaacatgcaactgtccattagcgtctactttcacatttctctttttagctgcaactgttttttttgccatatcaacaattattatttagtagcttttttcttattagcaacggttttctttctacctttacgagtacgtgcattgttcttagtgctctgacctctaacaggcagaccaatacggtgacgtacaccacgatagcaaccaatatccattaatcgcttaatgttcaattggatttcagaacgaagatcaccttccactttatactctgcaccgataatctcacgaatcttagcagcttgatcatctgtccagtctttaaccttcagatctttatctacaccagctttatctaaaatttttgctgaactactgcgacctattccatatacataggtcaacgcaatttcacctcttttgttctgaggtaaatctacaccaactattcttatagccatatacttaattattttttttgcaaaaataacaaattatccttgacgttgtttatacttaggatttttcttgttaataacatacaaacggccattacgtctaacgatcttacattctggcgtgcgtttctttaatgatgctcttactttcatatcttattttatttatatctaaacacaattcttcctttcgataagtcgtaaggagacatttcgactctcactttatctcccggcaaaatcttgatgtaatgcatccgcatcttacctgaaatatgtgcagtaatctcatgtccgttttctaattcaacacgaaacattgcatttgacaatgcttcaactataactccatcttgttctattgcagattgctttgccatattatattgctttatctcctaaaacttcttctatgaatttgaatgaagacaaaatatcagcttcaccagctccaacagctatcgtatgttcaaaatgtgcagcacatttacgatctctggtcctcacagtccatccatcacgttccataatcacttgtcgatctcccaatgttatcatcggctctatcgctatgcaaaggcctcttttcatcaaaggtccatatcctcttttaccataattaggcacttgaggatcttcgtgcatctctttaccaatgccatgaccaacaaactcacgcactacaccataagagtgagactcacaatattgctgaatagcatacccgatgtctccgattcttttgccttgcactgcgttctgaatgccaatatataacgcttctttagttaccttcaacaagttacgaatttcttcgtccacctctcctacacaaaaagtataagcagaatcaccacaaaaaccattcatgtaagttccgcaatccactgatacgatatcgccatctttcagtacaatatcccctgggattccatgtacaacctgctcattaacagaagtacaaagagatgcgggaaatggttctccatattgattcggaaatcctttgaaagttggagttgccccatgatctctaatgaactcttcagcaaccttatccaactcacgtgtagttacaccaggcttcaccagtttggcaacctctgcaagagttttaccaacaagcaggttactctgacggagcaattctatttcatcttctgttttaagaaatatcatttctaatctaaagaattaatatgccgctacaccagcgcgtcctttaatacgaccagacttcaacagaccatcatagtgtctcatcaacaaatgactttcaacctgttgcagtgtatcaagaacaacacctacaagaattaacaaagatgtaccgccgaagaattgagcaaatcctgcttgcactccgaatataccggcaaaagcaggcataatagcaactaaagccaagaagaaagaacccggcaaagtaatacgagacattatatcatcaatatactctgctgttttctttcccggtttaataccagggatgaaaccattatttctcttcatatcctcagccatctgagtcggattaattgtaattgcagtatagaaatatgtaaataatataatcattaccgcaaaaacaaaattataccagaaacttgtatgatctgtaaacgcatgcaagaaaccgcccgcatcatttacatttgaaaaaccgataaacgtaattggaataaacatgattgcctgagcaaaaatgataggcataacaccagcagcattcactttcaaaggaatgtattgtctagcaccaccatattgcttgttaccaacaattctttttgcatactgtacaggaatctttcttgtaccttgtaccaaaagaatagcagcaccaatcactaataacaagaatacgatttcaattataaacatgatcaaaccaccactcttatttgctactctggatacaacttcttgcaacaaagcatcagggaaacgagcgataataccaatcaagatgataaatgaaataccgttaccaatacctttatcagtaattctttcaccaagccacaaaataaacatactacctgctgccaaaataatggtagaggtaaccataaacagagtccaatctaatgaagcatttaaggaagggccagcctgcattttaagattgagcaaataagaaggggcctgaactaacaatatagcaatcgtcaaataacgagtatattgattcatttttcttctgccgctctcaccttcgcgttgcagcttctggaaatacggcacagcgattcccaacaactggattacgatagatgcagagatataaggcatgattcctaatgcaaaaatagaggcattagaaaatgctcctccagagaacatatttaacaaggctaaaaggccttcacttgtttgttcgtgcaattttgccagcattgccggattgatacctggtaatacgacatatgatccgaaacggtaaattgccacaaacaatatggtgatgaggatccgctgtctcagatcctcaatcttccatatattctttaatgtttcaatagcttttctcattgaatcagagttttactacagttccaccagcagcttcaatagcagcagttgcagtcttagagaatgcatgagcttctacttccagcttgttagtcagagttccgttacccaatacttttaccaactgatttgaagatataaatcctgcttcgataaagtcgtttacaccaatttttgccaagctcttagcttcagcaagtttctggatagtatccagattgatggctttatattctacacgattgatattcttgaaaccaaatttaggaactcgacgttgaagaggcatctgaccaccttcaaaaccgatcttcttagagtatccagatcttgatttagctcccttatgacctcttgtagaagtaccgcctaagccagaaccagttccacgtccaattctttttcttgtcttagtagatccctctgcaggttttaaattacttaagttcatattgtaatttcgttttattattcaacaaataattacttaacaatggcaaccaagtgttttactttatctaccatcccaagaattgaaggagtgctttcgtgttcaaccacacggttcagtttacgaagtcccagtgcatcgagagttcttttctgatcagctggagcaccaattctacttttaacttgtttaatctttatagttgacatatctcctccttatcctctaaatactttttcaacactaatacctctgttctgagcaaccattcttgcatcacgcatttcactcaaagcttcgattgtagctttaacaaggttgtgcggatttgaagaacctttagatttagccaaaacgtcagtaacaccaacactttccaatacagcacgcatagcaccaccagctacaacaccggttccgtgagatgcaggtttgatgaatacttcagcaccaccaaatctagctgattgttcatgaggaacagtaccttttaaaataggtactttcaccaggttctttttagctgactcaacacctttagcgatagcagctgttacttcacctgctttaccaagtccccaaccaatgataccttcttcgttacctacaacaacgattgcagagaaactaaaagttctaccacctttggtaactttagtaacacgattaatagcaaccaatctatctttcagttctatatcgttagtaatcttaactctattattaactcctgccataatgattaaaatttaagtccaccgttacgagcagcatcagctacttcttttactctcccatgatacaagtaaccattacggtcgaaaacaacagtagttatacctgcttcctgagcctttttagcaatcatttcaccaactttagcagcttgttcttttttagcgactttctcagtcaagcctaaagaagaagcagcggccagtgtcttaccagaaagatcatcgataatctggacataaatttgcttgttacttctaaatacactcatacgcggacattcagtagtacctgaaatcttgttgcgtactctatatttgatcttaactcgtctttctatttttgttgtcataataatctaattttatatgaattacttagcgccggctgatttaccagactttctacgaattacttcgccaacaaacttaatacctttacccttgtatggttcaggcttacggaaagaacgtattttagagcaaacttgaccaagcaattgtttgtcacacgattccaatataataagaggattcttatttctttcagacttcgtttcaacttttacctcagcaggtaattgaatgaaaatattgtgtgtataacctaaagccagttcaatgatgttaccttggtttgaagcacgataacctacacctacaagttccagttctttcttgtaaccttcagatacgcccacaaccatgttgtgaaccaatgaacgatacaaaccgtggaaagcatgtttctgcttcgggttatcaagcatttctttatcgttttctgttaaagttacgtgtccgtcttcaatagtaacattgatagcaggattcacatattggctcatttcgcctttgggtccctttacggtaaccacattatccttcagagtgattgtcactccagcagggatactaatgggtaattttcctattcttgacattctaattcctcctaattaatatacataacacaagacttcaccaccgatcttcagttctgcagcctctttgttagtcattacacctttggaagtagatattatagcaatacccaacccattaataacacgcggcatatctttgtaaccagtatacttacgcatacccggagaagatattctttctaactttttgattgcgttaactttgttaacagaatcatacttcaaggcaaccttaatagttccttgaggaccatcttctacaaacttataattaagaatgtagcctttttcaaaaagaatcttagtgatttcttttttcaaattcgaagcgggaacttcaacaactctgtgctttgcaccaatcgcgttccgcaacctcgttaaataatctgctattggatcagtcatataaaaataaattaaattaatcaggactaccctgacaatatttaaacaataattaccagcttgctttttttacgcctgggatcagtccgttagatgccatctcacggaattgaattctcgaaattccgaattgacgaatataacctttaggacgaccagtcagtttgcaacggttgtgcatacgaattggattagaattctttggcaactcttgcaacttctgtgcagcttcgaaagcatcagcaggatcacctgttcttacgatttgcttcaaagcagctcttttctcggcgtatttggctactaatttagcacgctttacttcacgtgctttcattgattcctttgccatatctattagtcttttttagcgtttttaaaaggtaaaccgaattccttcagcaaagcataaccttcttcatctgtttccgcagaggttacaaaggtaatattcattccgagaattcttgtaatactatcgatatttatttcagggaaaatgatttgttcctgaataccaagggtatagttacctttaccatcaaacttactttcgatacctttgaagtcacgaatacgaggaagagctacacgaaccaatttttcaaggaattcgtacattctttcacgacgtaaagttaccataacaccaatcggcatttttttacgcaacttaaagtttgcgatatctttacgagaaatggtagctacagctttttgacctgtaatagctgtcatttcattgattgctacttcgataatcttcttatcagcaacagccatacctaatccctgattgattacaatcttcttaagtacgggtatctgcattgtagaagaatactggaactgtgatttcaatgcaggtgctatacgctctgcatattctttcttaagactagcagtattactcattacttaatctcctctcctgattttttagaataacgcactaaagttccttccgaactcttttttctcccaatacgcgttgctttaccagtttttggatcaaccgggttcaagtttgaaatgtggatagaagcttcttgcttcacaataccaccttgtggattctttgcattcggctttgtgcttttagataccatattgataccttctacaaatgcacgtccttctttaacaagaaccttcaatacacgaccagttttgcccttatcttcgccagcatttacgtaaactgtatcgccttttttaatatgtaatttactcattacttaaatcttttacaaattaaagtacctcaggcgcaagtgacacaactttcatgtttgtagcacgaagttctcttgctacaggaccgaaaatacgactacctctaatttcacctgcattattcaacaacacgcaagcattatcatcaaaacgtatataagaaccatcaggacgacggatttctttctttgtacgtacaatcaaagcctttgatactgcaccttttttaacatcactagaagggataacactctttactgaaactacaatgacatcccccactgaagcataacgacgacctgtaccacccaaaacgcggatacacaacgcctctttcgctccactgttatcacatactgtaagtctggattctacttgtatcataattacttagctctttcaattatttctactaatctccatcttttagtcttgctcaaaggacgagtttccatgatgcttacagtatcaccgatattgcattcattcttttcatcgtgagcatggtacttcttcgttttactaacgaacttaccatatatagggtgtttttccttaaatttggcagcaactgtgatggtcttatccatcttattgctcaacacaacccctgttctttcttttcttaaatttcttgcttccatcaagctgatcatttattgttaagttctctttcgcgcaattctgttttcatacgcgcaatagtcctgcgtaattgtttgatttgagcaggattttccaaaggagaaatagaatgattaataaccatttggttataattagctgtttccgcctctactctttctactaaatcattagtagtcatttcttttatttctgcaattttcataacacttacgcattttgattttgaatatcataatcacgtcttacgacaaacttcgttgtaataggaagcttttgagcagctaagcgcaatgcttctttcgcgatttcgtaagatactccttcagcttcaataatgattctacctggagtcacaggagccacaaatccctctggagcacctttacctttacccatacgtacatcggcaggttttctagtgatcggtttatccgggaatatacggatccagatctgtccttgacgttgcatatatcttgttactgcaatacgagcagcttcgatctgacggcctgtaatccacttagtctccaaagcctttatgccaaaagaaccaaaggccagctggttgcctctctgggcattacctttctgacgacctttttgttgtcttctgaattttgtctttttcggttgtaacatagtttcctaaaattcaaattcgtttagcgattatttttctttcttttgaagttctttccgccgttgtttccactattgtttccacgaccactttctttgctttgtgtaaagttcggagccaattctttcttaccaaacacttcacctctacaaatccaaactttgatacctaaaagacctactttagtcaatgcttctgcatgacagtagtcgatatcagctctgaaagtgtgcaacggagttcttccttctttatacatttcagaacgggccatttcagctccattcaaacgtcctgaaatctgaattttgataccttcagcacccatacgcattgtgtttgcgatagccattttgatggcacggcgataggcaattttaccttcaacctgacgagcgatgttgttagcaacaatcacagcatccagttccggtctcttcacttcaaagatattgatttgaatatctttgtcggtaaccttcttcaactcctcttttaacttatcaacttcttggccacctttaccgataataatacccgggcgagcagtgcaaacagtaatagtaacgagcttcagcgtacgttcaattacgattcttgatacacttgcttttgcaagtcttgcattaagatatttacggattttgctatcttccagcaaagaatcaccgtaatcatttccaccataccagttagaatcccatcctctgataattcctaaacggttgcttattggattaactttttgtcccatctaccttaattttgatcttcgttattacttttagcaccaacgaacaatgttacgtgatttgaacgtttgcgaattctataacctctaccctgtggtgccggtctcattcttttgagtgtagctccaccatcaacaaaaatctgtgttacgaacaactcgccactttccgctttacgttcgtttttctgttcccagttagcaattgcagagcgaagcaatttttccactcttgcagcagcttcttttgaagaaaatttcaaaacaccaagtgctctgttcacttccataccacggatcatgtctgcaaccagacgcatcttacgcggagaagtaggaacattttgcaattttgcaaaatacatggtcttaagggcttcttttctcttttcagccgatattttttttcttgctcccattattatttattactttattatttcaaataaatcctgttatcttttcttgttaccagcgtgtcctctgaatgtacgagttggagcaaattcgcccaacttgtgtcctaccatattctcggtaacataaacaggaataaatttatttccattgtgaactgcaactgtatggcctacaaaatcaggcgaaatcattgaagctctggcccaagtctttactacgactttcttacctgattcattcatggcaagaattctcttttcaagcttaacgttaatatatggacctttttttaatgaacgactcatagtttactcaattaatcagattacttttttcttctctcaataatgtacttagacgattgtttcttaggagctctagtcttaagtcccttagcatacaatcccttacgtgatcttgggtgacctccagaagcacgtccttcaccaccacccatcgggtgatcaaccgggttcattacaacaccacggttacgaggacgacgtccttgccaacgagaacgtccagctttacctgaactttccaatccatgatcagagttacctacactaccgatagtagctttacaagtgctaagaatctgtctaacttcacctgaaggcaacttaattacacaatacttaccctcacgagaagtcaactgagcaaagttaccagctgaacgaaccagagcagcaccctgtcccggacgtaattcgatattgtgaatcacagtacccaccggaatgttttgaagaggaagagcattaccaatctctggcgctgctgtttcacctgacatcagagtcgcaccaacttgcaatccattgggagcaataatatatcttttttctccatcagcgtaaaataacagagcgatacgagccgaacgattcggatcgtattcaattgttttaactactgctggaacaccgtccttatttctcttgaaatcaacaattctaatcacctttctatgaccgccaccaatgtagcgcatagtcatcttaccttcgctgttacgacctccagatgatttcttaccatatacaagagacttttctggtactgatgcagtaatttcttcgaaagtaccaataattttatgtctttgccccggtgttgtgggcttaaatttacgtactgccatttttattaaatattgctataaaaatcaatagtatctccttctttcaatgtcacgattgcttttttgaaagcattcgtacgaccattgatgatacctgctttggtataacggctcttatttttgccagcatacttcacagtattcacatcaactactgtaacattataaagagcttcaatttccttcttaatttccagtttgttagcttcaggacgtacaacaaagccgaaacgattcagcttatctgtgattgcagtcattttctctgttaccaacggtttaataataattcccattatttaagcctcctttttaaattaagatattgtcaatagccttcagagagttttcagtaagcacaacaaccccagcattcaatactctgtaagtatttaatcccgagatagtctgcacattagcaccctcaatgttacgagctgacaaatatacgtttttatttgcttccggtaaaattacaagtagctttttatcggaaactttaagattttttgtcattgcaacgaaatcttttgtcttaggagcttcaaatgtgaaatcctcaacgacaacgattgcatcgttttgagctttataagacaaagctgacttacgagccaatgtcttaacttttttattcaacttgaagaagtagtctcttggtttcggaccgaaaacgcgggcaccacctacaagaaccggtgagttcatatcaccacgacgagctccgccaccacctttctggcgaccgatcttacgagttgaaccactgatttcacttctttcttttgacttatgagtaccctgacgctgattagccataaattgttttacgtccaaatagatagcgtggtcgttgggctcaattccgaagatagattcgtttaacgtaacctttctcccagtgtcttcacctttaatgttatatacgttaacttccattatttctcaattaatacgattgaacctttgcaacccgggatagaacctttaatcaaaagaaggttatgatccgcgattacttttaatacctgcaagttttgtacagtgactctgtcaccaccaagttgtccacccatgcgcattcccttgaatacttttgcagggtaagaacaagcaccaatagaacccggtttacgagcgcggttgtgctgtccgtgagtagcctgacccacaccaccaaaaccatgtctttttactacaccctggaaacctttacctttagaagttccaacaacgtcaacaaagttagcatcattaaacatctctacggtaatagtatcacccagattcaaatctgttccaaattctttgaactcagccaagtgtctcttcggtgttactcctgctcttttaaaatgtcccatcaacggtttagttgtatgtttttcctttttgtcctggaaacccaactgaacagctgcatagccatctttttctacagttttaacttgagtaacaacacaaggacctgcttcgataacagtgcatggtacatttttaccatcggcactgaaaacggatgtcattccgattttttttcctaataatcctggcatttcactaatttttaattatcaaactttaatttctacttccacaccacttggcaattccaacttcatcagagcatctactgtcttagctgttgagctatagatgtcgatcaatctcttataagaagagagttcaaattgctcacgagactttttgtttacgaaagtcgaacggttcacagtaaagatacgcttgtgcgtaggcagaggtatcggaccgctaacaatagcacctgtagcttttacagttcttacaattttctcagctgacttgtcaaccaagttgtggtcgtaagatttcaatttaattctaattttctgactcattattttttttaattaatacatttataataagataaagcggcaggctaagagtcattcgctagcctgctgctttagatattttagagtaaatcagcacgtccttttacttcttccaatacagccttggcaatagaagaagaaacctgagcgtgatgagagtaagtcattgatgaagttgcacgaccagaagtgatagtacgtaaagctgttacataaccaaacatttctgccagcggaaccatcgctttcacgatacgggcaccagaacgactagattccataccttcaacctgtccacgacgtttgttcaagtcaccgataacatcacccatattctcttccggagttacaacttccagcttcatgataggttccatcaaaacaggacctgccttagcacatgcatttttataagcctgcattgcacagatttcgaatgacaactgatcagagtcaaccggatggaatgaaccatcaaccaaagtaactttcaatgaatccagcggataacctgccaaaacaccactcttcatagcattcgtaaagcctttctgaacagcaggaataaattccttaggaatgttaccacctttcacttcgtcaacaaactgcaaaccacccaaagtgaaatctgcatcagccggaccaatattcacgatgatatcagcaaacttaccacgcccaccagattgcttcttatatacttcacgcaaattaactgtcttcgtgatagcttctttgtagttaacctgcggcttaccctggttacattctaccttgaactcacgtttcaaacgatcaataatgatatccaagtgaagctcacccataccagaaataaccgtctgacctgtctgttcgtctgtcttcacagtaaacgtcggatcttcttcagccaatttagccaaaccgttagacagcttatccatatccttctgcgtcttaggttctacagcgataccgataactggttccgggaagtccatagattcaagtacgatcggagcgttttcatcacacaaagtatcaccagtgtgaatatccttaaaacctacacctgcaccgatatcaccagcaccgattacttcaaccggattctgtttgttagagtgcatctggaacagacgagaaacgcgttctttcttaccagagcgagagttgtagatataagaacctgcttcaattttacctgaataaacacggaagaaagtcaaacgacctacatatgggtcagttgcgatcttaaatgctaaagctgatgttttttcatcatcacttggtttacgatcttcttcagctccagtattaggatttgtacctattacattctctgtatcaagcggagaaggcaaaaaagcacaaacatagtcaagcaatgtctgaacacctttgttcttgaaagaagatccacaaagcatggggactacagccatctgaactgttgcattgcgaagagctctcaacacttcttcttcagtaatagtagaaggatcatcgaaatatttctccatcaaagcatcatcaaattcagctactttttcaagcatcttgtctctccactcgttagcttcatcgacaagttctgccggaatttcctcaacactgtagtcagcacccattgtttcatcgtgccaataaatagctttcattttgataagatcaacaagacctttaaaagattcttcagcaccaataggaacaacaatcggacacggattagccccaagcacatccttcatctggcgaactacttcaaagaagtctgcaccagaacggtccatcttattaacataagcaatacgaggaacgttatatttatcagcttgacgccatactgtttctgattggggctcaacaccaccaacagcacaataagcagccacagctccatcaaggatacgcaatgaacgttctacctctgcagtaaaatcaacgtgccccggagtgtcaatcaagttaattttataagtatcaccagcatatttccatcttgttgttgtagcagcagatgtaatagtgataccacgttcttgctcctgttccatccagtccatagtagcagcaccgtcatgaacttcaccaattttgtgagtcaatccagtgtagaacaggatacgttcagaagtagttgtttttccggcatcgatgtgagccatgataccgatattacgagttaaatgtaaatcatgtttagccatcttctaattcctttactttaagtttatatttggtttcttacagtattagaatctaaaatgagcaaatgcacggttagcttctgccattctatgcatgtcttctttacgtttgtatgcaccgccttgttcattgaaggcatccataatttcagcagccaacttgtcagccattgatttaccacctcttttacgagcaaacagaatcagattcttcattgaaattgattctttacgatccggacggatttcagtaggaacttggaaagtagcaccaccgacacggcgagactttacttccacttgcggagttacattatccaaagcctttttccagatttcgagagcagatttttcttcgttaggaagtttagctttcactgtttccagagcggcataaaagatttcataagatgtatttttctttccatcatacatcaagtggttcacgaacttagaaaccttttggtcattaaacacgggatccggaaggattacgcgtttttttggttttgcttttctcatttgtttgaaaaataatgtttttgttcttggttgtctacatcttgacttcttcaactctccctccggagaatttactcaacctttagcatttccaacaaactaaaacgtaagttattactttaattttaatcaggtcttaatccttatttcttcttacctttagcaggagcagcagcttgtcctggtttcgggcgcttagcaccatacttagagcgtctttgagtacggccagcaacacctgctgtatcaagtgtaccacgaacgatgtgataacgtacacccggaaggtcttttacacgaccaccacgtaccaaaacgattgagtgttcctgcaagttgtgtccttctcccggaatgtatgagttcacctctttttggttagtcaaacgtacacgagctactttacgcattgcagagttcggtttcttcggagtagtagtatatactctcacgcaaacgccacgtctttgaggacatgaatccaaggctggagatttacttttctccaccagcacttcgcgtccttttcttactaattgctgaattgtaggcattttaattgttttttgatttatattattgttatattaatttcgtaactatacattttgggctgcaaaaatacgaataatatttgaatattcaatgcgctacaacttttttttcttttttaatgtttttatatcatcttcatgcttcgccttttacacccgccaagggaggaagagaaggttcatctgaagtacgaatcgggccgaatacccgttcatactttgctatattgtcttccaatgcccgcagcaagcgttttgcgtgttccggagccacaataatgcgagattgcacgccagccttcggtatgcccggcattatgcgcacgaagtcaaggatgaattcagaactagaatgagtaataatagctagatttgcataagttccctgcgctacctcttctctcaattcaatctgtaattgtccattgttattttgttcttccatattttatatgattaaaaagttatcctgcaaaataacacatttttcctgagactaatggtaatacacacaagtaaaaaagaaataaaaaaaggagcaattacccaatctggcaatcgctccttctcatatagtcaattgaattgtatttattctacttcattgtagtcaagtactgttttcttgttagccaagatacggtcatactcttcttttgatccaacgatgagtttttcaaattcgcgctgaccggtacctgcaggaatcaagtgaccacagatcacattttccttcataccttccaacttatcgatcttaccgttgatagcagcctcattcaagactttcgttgtttcctggaaggaagcagccgacataaagcttgaagtctgcaaagcagcacgtgtaataccctgaaggatctgagtagaggtagcagcaacagcatcacgaacctcaaccggtttcaagtcacgacgtttcaacatactgttctcatcacgcaacttgcgggcagttacaatctgaccagcttgcatattttgagaatcaccagcatccactacgactttcttaccccagatacgatcattttcttccatgaattccagtttgtctacgacttgctgttcgaggaaacgagtatctcccggttcatcaatctgaaccttgcgcatcatctgacgaacgataatctcgaagtgcttatcattgatcttcacaccctgcaagcggtatacatcctgaacttcattcacgatatattcttgtacagctgtaggacctttaattgccaagatgtctgctggagtagtagcaccgtcagacaacggagtacctgcacgtacatagtcattttcctgtaccagaatctgcttagacagtgcaaccagatattttttaacctcaccagtcttggaagttacaatgatctcacggttaccacgcttgatcttacccattgttacctcaccgtcgatttcagaaacgacagccggatttgacgggttacgagcttcaaacaattcagtaacacgaggaagaccacccgtgatatcacccgctttaccgacggcacgcggaatcttcacgattacttcaccagcttttaccttctgaccattctcgatgattacgtgaccacctaccggtaagttataagtacggatcaaatcaccgtcctctgtcaaaatatgagctgtaggaactttggttttatccttggattcaataataataatttcacgaagacctgttgcttcatccgattcaaccttataagtaacgttttcaattacgccctcaaattcgatcttaccggttgcttctgtaataataacagcattgaacgggtcccacttagcgatcagtttgcctttttctaccaagtcgccgtcacttacatacagtgttgaaccataaggtacgttatgagtagaaagaacaataccggtatttacatccacaaaacgtacttcggccaaacgacctactaccacttttgcagattcacccatctcgtcaacgatatctactgtacgcaactcttcaaattcaagacgtgcattatttttagcaacgatactggcgttagctgcaatatttgcagcagtaccaccggcgtggaatgtacgcaatgtcaactgtgtacccggctcaccaatagactgagcagcgattacaccgacagcttcacccttctgaaccatgcggctcgttgccaagttacgtccgtagcatttagcacaaacacccttcttagcttcacaagtcaataccgaacgaatttcaacactctcgatcggagactcctgaatcttcttggctacttcttctgtaatttcttcaccaccggcaacaagtaattcacctgtggtaggatgaataatatcatgtacggaaacacggcctaagatacgttcgtacagagtagcaataacctcatcgttattcttaaggtccgtacaaaccaatccgcggagagtaccgcagtcttcttctgtaataatcacatcatgtgatacgtccaccagacgacgggtcagataaccggcatcggcagtcttcaaagcggtatccgccaaacctttacgagcaccgtgggtagagataaagtactccaacaccgaaagtccttctttaaagttcgacaaaatcgggttctcgatgatctgaccaccttcagcacctgctttctgcggttttgccatcaaaccacgcatacctgacaactgacgaatctgctctttagaaccacgggcaccagagtcaagcatcatatatacagagttgaaaccctgatcgtccgaagaaatagtcttcatcaggatattagacaactcggagttcacatgtgtccaaatatcaattacctgattgtaacgttcgttattggtaatgaaacccatgttatagttgtttacgacttgttcaacttcgtcgtaacctttttgtaccaaagtttctttttccttcggaatgataatatcacccaagttgaatgacaaaccacccttgaacgccatctgataacctaaattcttgattccatccaggaagtcggcagccttagccacaccacataccttaattacatcactaataatatcacgaagagatttcttagagataattgtattgatataaccagcttcaggtggaacgatttcattcacaatcacacgtcctactgaagtttcgcgcattacgtctacaatgttaccattttcatcaacgtctttcacgataaccttcaccggagcatgaatatctaccttaccttcattgtaagcgatcaacgcttcttccggtccgtagaatgtcaaaccttcaccttttgcaccggcacgcaacttagtaatatagtacaaaccaagaaccatatcctgtgcaggcacagtaataggcgcaccgtttgccggattcaagatattatgtgattgaagcatcaacatttgtgcttcaagaattgcttcattactcaaaggtaagtgaacagccatctggtcaccgtcaaagtcggcgttgaatgccgtacatgccaacgggtgcaactggatagctttaccttcgatcattttaggctggaaagcctgaatacccaaacggtgcaaggtcggagcacggttcaacagtaccgggtgtcccttcattacatgttccaagatatcccaaatcaccggctctttgcggtctacgattttctttgcagacttaacagtcttaacgataccacgttcgatgagcttgcgaataataaacggcttgtataattcggcagccatcaatttaggaataccgcattcacccatcttcaattccggaccaacgacgattacggaacgagcagagtagtcaacacgtttacccagcaagttctgacggaaacgtccctgtttacctttcaaactgtcagacaatgacttcaacggacggttggcatctgtcttcacagcacttgacttacgtgagttatcaaacaaagaatcgacagattcctgaagcatacgtttttcattacgcaagattacttccggagccttgatttcaatcagtcgtttcaaacggttgttacggataatcacacgacgataaaggtcgttcaagtcagatgtagcaaaacggccaccatccagcggaaccaacggacgaagttcgggcggaataaccggtacgatacgtacgatcatccattccggtttgttacgtccacgtgatgcgcggaacgattctactacctgaagacgtttcaaagcttcattcttacgttgctgagacgcatcgtttccggcgcggtgacgcagttcgtaagacaaagcatccagatccaaacgagccagcaaatcatagatagcttcggctcccatctttgcaacaaatttattcggatcattatcttcaagatactgattgtctttcggaagagtatccagaatatccagatattcttcttcagaaagcaaatcatattcagctacgccatcttcagctttcacacccggctgaataacaacataacgttcgtagtatataatcgaatccagtttctttgtcggcaatccgagcaaataaccgattttattaggaagcgaacggaaataccagatgtgagccaccggcacaaccagctggatatgtcccatacgttcacggcgcactttcttttcagtaacttccacaccacaacggtcgcagacgatacctttataacggatacgcttgtatttaccgcaatgacattcataatccttgataggaccaaaaatgcgctcgcagaacaaaccgtcacgttcgggtttgtacgtacggtaattaatggtttcaggcttcaaaacttcaccactcgaattctcaaggatttcttccggagaagccagaccaattgagatcttcgagaaattacttttcgtcttattttcttttctaaaagccatactctatataattgagatttgataattgaatcattggaaattgaaaaaagtgcggatgccaacagaccttcatcggtacattgacatctcacattctttcattattttattctaggttgatactcaaacctaaacctctcaactcgtgcaacaatacgttcaaggattccggaataccaggttgtggcatcggttcacctttcacaattgcttcataagccttcgaacgtcctaccacgtcatcagatttgatagtcaggatttcctgcaagatatgggcagcaccgaaaccttcgagtgcccaaacctccatttctccgaaacgctgaccaccgaattgagctttaccaccaagaggttgctgagtaatcaatgagtacggaccgatagaacgagcatgcatcttgtcttcaaccatgtggcccaacttcaacatgtaagttacgcccacagtagctgcctggtcaaattgctcacctgtaccaccatcacaaagataagtcttacagtagcgaggcaatcctgccttgtctgtccactgatccagatcttccatggtagcaccgtcgaaaataggagtcgcgaatttcacgcccaacgtttttccggcacgtccgagtacagcttcaaaaatctgaccaatgttcatacgagaaggcacacccaacggattcaacacaatgtcaaccggagtaccatcagccaagaacggcatatcctcctgacgaacaacacgggatacaatacccttgttaccgtggcgaccagccatcttatcacccacaccaatcttacgtttcttagcaatatatacttttgccatctggataataccagcaggaagttcatcaccaattgtaatagcaaacttcttacgtttcaattcagcatccagctctttatatttcttaatgaaattcatcaccagatcacgaatcataccgttaatatgatcgtcgcttgtccagttgctcaattgaatagaagtaaagtcaagtgaatcaaaatcagaagcactgaacttagaacctttcgcaataacttccgcacccaaatagtctttcacaccttgagaaaccttaccttcagtcaaagtcatcagtttcttaaccaggatacgtttcaagtcagctaccttagattcaaattcatcatcaatcttaggcaacaatgctttatcggccagtttagagctacgattcttaatcacacgtgagaaaagtttcttatcaatcaccacacctttcaaagaaggagaagctttcaaagaagcatctttcacgtcacctgccttatcaccgaagatagcccgaagcagtttttcttccggagaaggatcagattcacccttcggcgtaatcttaccaatcatgatatcacccggctcgatacgagcaccgattcttacgataccgttttcatccaagtctttggtagcttcttcacttacattcgggatatcagaagtcaactcttccataccacgttttgtttcacgaacttccagagaatattcctctacgtgaactgaagtcaacaagtcttcgcgtaccacacgttcgttcaatacgatagcatcctcatagttgtaacccttccaaggcatataagctaccaacaggttcttacccaatgccaattcacccttttcagtagaataaccttcagtcaagatatcacctttcttcacacgctggcctttgtcacaaatcggacgcaagtcaatcgtcatgttctggttagtcttacggaacttaggtattctatattccttcaaagcaggttcgaaacttacaaattcttcgtcttccgtacggtcatacaaaatacggatagtagtagcatccacatagtcaaccacaccatcgccttctgcggtaatctgggtacgagagtctcttaccaactgacgttcgatacctgtacctacgatcggagcttcacttctcaacaaaggaaccgcctggcgcatcatgttcgatcccatcaatgcacggttagcatcgtcatgttccaagaatggaatcaaagaagctgcaatagatgcgatctgctgaggagcaacgtccatcaagtcaacttcagatggttcaacaaccgggaaatctgcatcttgacgagacttaactctgttaagtacgaatgtaccatcgtcattcaacggagcatttccctgcgcaataaccttttcttcctcttcttcagcagtcagataaatcagaccgttatcagaaagatccacttttccattttccaccttgcggtagggagtttcaatgaatcctagctcattaatcttagcaaatacacacaatgaagaaatcaaaccgatgttcggaccttcaggagtctcaatcggacaaagacgaccatagtgtgtatagtgaacgtcacgaacctcaaatccggcacgttcacgggaaagaccaccaggaccaagggcagacatacgacgtttgtgcgtaatttcagccagcgggtttgtctggtccatgaactgcgacaacgcgttcgttccgaagaatgagttgattactgaagaaatagtctttgcattaatcaaatcaatcggagtaaacacttcattgtcacgaacgttcatacgttcacgaatcgtacgagacatacgagccagccccacagcaaactgattagaaagctgttcaccaacagtacgtacacgacggttactcaagtggtcaatatcatccacatccgcttttgagttaatcaactcaatcagatatttgatgatttcaataatatcttccttcgtgaggacacgcacgtccatgtcagtcgtcagattcaactttttgttgattctgtaacgacctacatcaccaaggtcatatcgtttttctgagaagaacaagttgttgataacctcccttgcacttgcgtcatcagccggatcggcattacgcaactgacggtagatatacaacacagcttctttttccgagttactcgggtccttctgcaacgtattatatatgatagagaaatcggactgattcggttcatccttatgcaaaaggatgttctgaactcccgactccaaaatttcatcaatatgctcctcttccagtacggtttcacggtcgataataacttcgttacgttcaatagaaaccacttcaccggtatcttcatcaacgaaatcttcaatccatgttttcaagacacgtgcagccagtttacggcctaacaccttcttcagatttgtcttgtttaccttcacatcttctgcaagatcgaaaatctcaagaatatctttgtcattctcgaagccaattgcacgcaacaatgtagtcaccggcaatttcttcttacggtcgatgtatgcgtacatcacattattgatgtcagtagcaaactcaatccacgaacccttaaacggaataatacgagccgaataaagtttcgtaccattggcatgtacactctgaccgaagaacacacccggagaacggtgaagctgtgacacaactacgcgttcggcaccgttaatgacgaaagtagccttatcagtcatataaggaatcgggccgaggaatacgtcctgaatcactgtatcaaaatcctcatgatcggggtccgtacagtaaagcttaagtttcgcttttaagggaacactataagtaagcccacgctctatacaatcatcaatggtataacgcggcggatcaatataatagtccagaaactcaagaacaaaattgtttcttgtatcggcaatagggaagttttcagcaaatactttatacaatccctcattcttacgcttttcaggtggggtatctaattgtagaaagtcttggaatgacttcaattgtacttccaggaaatccgggtattctagcggattcttagtcgaagcaaaattaactctttgatttacagtatttgaagacatctgtcaatgaatttggagaacttaatttgaaatatatacacaaaaaggttaagaatcctcttgtgaaggattcctaaccgaattacctgattaccaggccaatgttatttaagttcaacttcagctccagcttcttccaatgttttcttcaatgattctgcttcgtctttagccaaaccttcttttactgtgctaggagcaccgtctaccaagtctttagcttctttcaaaccaagaccacaagcttccttaacggccttaactacctgaagtttagctgcaccagcgctcttcaatactacgtcgaaagaagttttttcttctgcggcagcagcaccagctgcaggaccagcagcaacagctacagctgcagcagcaggttcaataccgtattcttctttaaggatagttgcaagttcattaacttcttttactgtcaagttaactaattgttctgcaaaagctttcaaatctgccattttttgtatgattttaatgtttaaatacttgttgatttttgaaaattatttgggatgttattcccaaggctgtgacgcctttttccatttttacgcttcggtacgttcaccaagagtcttgagaactccgtgaagggtgttaccacctgattgaagagcagaaataacattcttggccggagattgcaacagtgcaacgatatcggcgataacttcattcttactcttgattgcaacgagagcatccaattggtctgcaccaacatagaagctttcttctgcatacgcagctttcagtccgggaataccgtctttcgctttgtctttgattaacttagcaggtacgtttgcagtgttagtaaacataacagcagtagtacctttcaaagaaccgtaaagaggtgaaaagtcttcttccaggctttcaagtgctttgtgaagcagagtgtttttaaccaccatcaatttgatgtctgatttaaagcaatctcttctcaatgcgctggtagcagcagcgttcatcgctgtaacgtctaccaagtagaagtgaccatattcctttactgtagcagcaatttgctctataatcgtacttttatcttcctttctcattatttctctgttttattagatttcatccactgatttcgggtcgattttaatacccgcactcattgtactagaaagataaatactcttaatatatgtaccctttgctgcggtcggtttcagcttgttcagagtagagatgaactctttcgcgttgtcgcgaatctgatcaggactgaatgataccttaccgatagaagtgtgaacgataccgctcttatcaactttaaagtcaatcttaccttgttttacttcttttacagccttagcaacatccatagttacagtaccactcttagggttcggcatcaatccacgaggaccgagtacacgaccgagtgcaccaattttacccatgatagatggcatagtgatgattacatcaatatcagtccatccacctttgatcttttcaatatattcgtcaagaccaacatagtcagcaccagcttcttttgcagcagcttcagcatccggtgtacaaagtaccaacacacgcacttctttaccagtaccatgaggaagtgaaacaacacctctcaccatctggttagctttacgcgggtcaacccctaaacgtacatcaatatccagtgaagcatcgaatttggaaaaagtgatttcttttaccaaagatgcagcttctttcagtgagtatgctttccctgcttcaattttttctgcagctaacttttgattttttgtcagtttacccattacaattgaagtttattagttattaaccgggaactccccttttacagcgatacccatacttctagctgtacctgcaaccattctcatggcagcttccacagtaaaacagttcaagtcaaccattttgtcctgagcgatcgtacgaacttgttcccaagtaagctcggcaactttcttacggttaggctcagcagaaccactctttaccttagctacttcaagtaattgaatagcgacgggaggagtcttgattacaaaatcgaaagacttatctgcgtagtaagtaatgataacaggtaaaattttacctgctttgtcttgggttctggcattgaattgcttgcaaaattccatgatattgatacccttagaacccaaagcaggtccaacgggaggtgatggatttgcagcgcctcctttaatctgtaacttgattagtccagcaacttctttagccatttttttattgatttatatataaacattaaacgaagaacaacaacagcgtaacaattccgtgttattccttttccacttgcataaagcccaattcaagcggcgttttgcgcccgaatatctttaccatgacctttagtttctttttttcgctattcacttcttcaatgataccactgaatccgctaaaaggtccaaaagtaacttttacagtttcacccaccacgtacggaatattgagttcttcacccgtttcctgcagttcgtccactgtaccaagtatacgattcacttctgattgtctgagaggcaccggtttttcggagccacctaaaaagcctatcacattcggagtgttgcgcaagtgatgagcgacctcaccaaccaaagcagcctccaccaaaacgtaaccaggaagataacttctttccttcacaatttttttaccattgcgaacctggtaaactttttcagtaggaatcaatacctgagatacatattcaccaaggtcactgttcttaagatcagcttcaagatattcctttaccttagcttcttttccactaatagcacgcagaacgtaccatttcttttcaatctcagccattttcaattcctaatttttaatgtggataaacgattttttccatgaagttctggaaacagacatccataccccatactaccaatgcaataagcagggaagcatataaaacaactactgcactgttagcaagttcagaatacgtaggccacgatactttatgtacaagttcgtcgtaagattctttaatataagctattacctttttcatttcaataatattagcacgggaggagaggctcgaactcccgacacccggttttggagaccggtgctctaccaactgagctactcccgtgtgtacataatcagttcccgatgaaaaccgggaactgattaattattgtgtattagtcgataatttcagtaatctgaccagcacctaccgtgcgtccaccttcgcggatagcgaaacgaaggcccgggttcaatgctactgggtaaatcaactcaactgtaatagttacgttatcacccggcattaccatttctgttccttccggcaaagtgatttcacctgtacagtccatagtacgcaagtagaactgaggacggtatttgttgtggaacggagtgtgacgaccaccttcttctttcttcaagatataaacctcagctttgaatttagagtgcggtttaatctgacctggtttacaaagaaccataccacgtttgatttcgttcttgtcaataccacgaagcaaaagacctacgttgtcaccagcttcaccttgatccaacagtttacggaacatttcaacaccagttacaactgatttcttatcttcacctaaaccaaggatttcgacttcatcaccaacgtggatgacacctgtttcgatacgacctgttgctacagtaccacgacctgtgatagagaacacgtcttcaaccggcatcaagaatggtttatcaacatcgcgcggaggcagtggaatccagttatcaactgcatccatcagctccataactttgtcttcccatttttcaacaccgttcaatgcgccaagagcagaaccacggatgataggagtattgtcaccatcgaaatcatagaatgaaaggagttctctcatttccatttcaacgagttccaacatttcttcgtcgtctaccatatcgcatttgttcaagaatacaaccagacgaggtacgtttacctgacgagccaacagaatgtgttcgcgagtttgaggcatcggaccatcagttgcagcacaaacgatgatagcaccgtccatctgagcagcaccagtaaccatgttctttacgtagtcggcgtgacccgggcagtctacgtgtgcatagtgacggttagctgtttgatattcaacgtgagaagtattgatagtaatacctctttctttttcttcaggagcgttgtcgatagaatcgaaagaacgcaattctgaaagacctttttttgccaacactgtagtgatagcagctgtcaacgttgtcttaccgtggtctacgtgaccgattgtaccaatgtttacatgcggtttggtacgttcaaatttctctttagccatagctttacttgttatttatttgattaataatcagcatttacatcctttatgagctgttaccgggacttgaacccgggacctcttccttaccaaggaagtgctctaccactgagctataacagcaagaaaagagagcggaagacggggctcaaacccgcgaccctcagcttggaaggctaatgctctatcaactgagctacttccgcattcttgccaaagttgtcactctgattgtgggcaaagatggattcgaaccaccgaaggcgtaagccagcagatttacagtctgccccatttggccactctggtatttgcccttttcaaaatcaagaaataaaagaactattttcaaacaatatgataaagacagatgttctatctttgttcttcggtttctttttgagcctcttgtcggattcgaaccaacgaccccgagattacaaatcacgtgctctggccaactgagctaaagaggcaaacttactaaaaaatgcaaccgtcacgttctaacgcgagcgaaacggctgcaaatttagttatttatttctttcccgcaaaatatttgggatttttttatttgctacgttgcttttccttgtatttaaccagctgttttacgagtgcttccacatctaaatcaattgcctcttcaaatgtatcacacactttgcttgcataaaactccccattggggattaatattttaatgcctgcttctttattttcagcaacttctggttttactacctttaatgacacctctactttctttatatcttcgtaatatttttccaacttggacactttcttctgaataaatgcctgcaattgctctgacgcatcaaagtgaattgattgaattctaacatccatacttacctcctttttttttaagctcttggatgagcttgtttatacacttttttaagttcttcaaatgtggcatgcgtatagatctcggtagtcgtaatgctctcgtgacccaaaagttcttttaccgcgcccagctctgcttcattattcagcattgtggtagcaaaagtatgcctcaacacgtgaggactccttttcttcagcgttgccacctttgacaggttccgtttcactaaattatagaccagattcttataaagtcgttcgccattctctctaataaagaaagcctccgacctttccggaatcgtttcgtttcttacattaatatattcaagcatcaactcccgcagttcatcaccgaacggtatcagtcgttgcttatttcttttcccggtcactttcagaagagaagccaaaaaatccacatccttatcatccaaacctattaattccgaaagtctcatgccagtagcataaaacacttcaatcaccaaccggtcccgacaacctttaaatccttcgccaaaatccgtatcatccaataaccgattcatttcgttctcttttaagaacacaggcaacggctttttgtttttaggtccttttattttacgcaaaggatctatagtcgtttctctctgcctcaagagatacttgtaaaacgttcggagcgaacttagcttacgatttacagaagttgaggtataccctttatccatcaatgaaacaatccattcacgaatcagttccgcctcgacttctaacggattaaattttccatactcttcctgagcaaactcctgcagttgctttatatcttcaccgtacgcaagaacggttttttcagaatagttccgctcatactggagataatcaagaaaagattctatcaacataatatcgcaacatctaaaatcgtgcaacgaatgtatgaaaagaattcaataattcaaaggaaattacgaattattaatcttctacttgctgaagttgttgtacgtaaactgcgcgttctttcttaagtcttttagttacagacggtttatcaaactgttgtctgcttctcaactcttttacaatgccagtcttttcaaattttcttttgaacttcttcagcgctttttcaatgttttcgccttcttttacaggtactacaatcattttgttactattaatatgttatgattaaaaaattctgcagtcaaattgcgccgcaaaattacacatactttctttattcacaaaactttcggcaaatatttctcaaaaactattcataaacaagttattaaatgcagaaagttagtacctttgaaacacttacatgtctataataatataataaagtatgaaacagagcataaaagagcgagtgcatgcactgcgcatgacctttcatcccaattctatcaaagcattcattattcccagcaccgaccctcatcttagtgaatatgtggctccccactggatgtcacgggagtggatttccggttttactggttctgccggaacagcggttatcctgatggatgaagcaggattatggaccgactcacgttattttctgcaagctacgaaggaattggagggcagcggcattaccttatataaagagatgttgccggagactcccagtattacagaatttctctgccaacacttaaaacctggagaatccgtaagtatcgacgggaaaatgttctctgtgcaacaggtcgaacagatgaaagaagaactggcggcacatcagttacaggtcgacatatttggagatccattgagtagcatttggaaagaccggcccgccatgcctgattctcctgcctttatttatgatatcaaatatgcaggaaaaagctgtgaagagaaaatatccgccatccgtacggagttgaaaaagaaaggtgtctatgctttattcatatccgcactcgacgagatcgcatggactctcaatttgcgagggaacgatgtacattgcaatccggtcatagtaagttacctgttaatcacacaggatgaagtgacttattttatttcaccggagaaagtgacggcagaggtagagacttatctaaaggaacggcagattggaatacagaagtatgatgaggtagagacattcctgaattcttttccgggaaaaaacattctgattgatccacgaaaaacgaattattctatctattcgtctattaatccgcaatgttctattcttcgtggcgagtcgcctgtcgcattattgaaagcgattcgcaatgagcaggaggtcgccggcatccacgctgccatgcaacgggatggagtagcactcgtcaaattcctcaaatggctggaagaatccgtatctaccggaaaagagacagaattaagtatagataaaaagttgcatgagtttagggctgcacagcctctctacatgggggaaagtttcgacacgattgcaggatataaagaacatggggcaatcgtacattattcagctaccccggaaagtgaggtgactcttcagcccagagggttcttactcttagattcaggagcccaatatctggacggaaccactgacatcacccgaaccattgctttaggcgaacttacagaagaagaaaaaacggattatacccttatattaaaaggacacatcgcgttggctatggccaaattccctgccggaacccgtggagcccagctcgatgtactagctcgtatgcctatctggaaccacagaatgaattttcttcatggcacaggacatggcgtcggacatttcctgagtgtacacgaagggccgcaaagcattcgtatgaatgagaaccctgtcattttgcagcccggcatggttacttccaatgagcctggtgtttataaagcaggcagtcacgggatacgtacggagaacctgacgttggtttgcaaagatggagagggaatgtttggagaatatcttaagtttgaaactatcactttatgcccaatctgcaaaaaagggatcatcaaggagatgctgacaaatgaagaaattgaatggttaaacaattaccatcagactgtctacgagaagttgtcaccggatcttaacgaagaagaaaaagtttggttacaagaggcaactgcttccctttaaaaagaacttgtctgacacccgggtgtcaagcatactgagacccgggtgtcagactgctcaagacccgggtctcatacatcacgacacccgggtgtcgtacaacatagaactgcattaaataaaaaactttattagaaacaaatattatatggctttaattaaatcagtacggggttttactcccgaaatcggagaaaactgcttcctcgcagataatgcaactattataggagatgtaaaaataggaaatgattgtagcatttggtttaatacggtattaagaggtgacgtcaactccatacgaatcggcaatggtgtcaacattcaggatggaagtgtcttgcatacgttatatcagaaatcgactattgaaattggcgatcacgtatccgttgggcataatgtcaccattcatggggcgaccatcaaagattatgcattggtagggatggggtcaaccgtcctggatcacgtcgtagttggcgaaggagcaatcgttgccgccggttcgctggtattaagcaataccatcattgagccgggaagtatttggggaggagtacccgcgaaattcataaaaaaggtagatcctgaacaagccaaagaactgaatcagaagattgctcacaattatttgatgtactcacaatggtataaggaataacattaagtaaaaccgaaaactaaacttcgttcctcctttctcttatgtttttaagaaaaagggggaacgttttttttcagatctccattgacacttcaatagccacattaataaaacaaaccatttacaaacacttaccataagattcatactactaaaactaatcatcattgattcctaaaatctatattcatattatttaaccatctgaaaatagatatattacgaattattcgtagatttgtaaagcattaaatccgggcggtaaaccaacaaacacttattcattatgaaaataaaactactacttacaattctcttattggcagaaataataaccgccaatgcacaaaacgcagaaaaagaatatttaaagaaagtacttaccaatttagaaaagattgaatctgcaacctactatgtcactaacgaaagctggcaacctggtgattcaaccgcattatctaccttgcatggcttcgttaaagagtacgataatccaatggactcaaccataggtgcaagctatgtttcactagatgccaatgatacaacaaaactagaattttgttatgacggcaacataagagtattaccttatcacgaaaataagaaattagcaattgatgatttcacattcagaccacttcctttcagactagtaagtcctccattcttcaatcacgcaaagaatatcatcagatatgcacttaccactaaggatcatattgtaacagagttgaaagatgagggtgataattattattttaaattagtcattgatgagaatcaacaggttgagttctttggaaaagcttatcacatgccacttcctccattcaatatcggcagtacagcttctatttatgagttatggatcaacaaatcgaatgacctaccttataaaaaacggagagagatgtcgcatgatatttccgtttcaacctgttcgaatcttgaaatcaataaactaacaattaacgactttaacgcgtctgattatttccccaaagattatgagatagtaaaatacagcgacctctacaagaaaaaagcagaaccaacagcatccagtcttatagggaaaaaagctcccggctggatattagaaaatatagaagcacagccggtatcattagccgactgtaaaagcaaaatcatactaatcaacttcacaggcattggttgtggtgcctgtcaggcagctgttccttttctgaaacagttaaaagaattattcaccagtgaagagtttgagttgattgcaatagaatcctggagtcgtaaagtatctgccatccggaattatgcaaaccgaaaggaattgaattataccattctaaatgcaacaaatgaggttataaaacaatatcagaccggtggtgccgcaccctactttttcatagtagaccaagaacgaatcatacgaaaagtaatcagaggttatagtaatgagaatacagataaagaaataataaatgcaataaaagaactactatgaacatgaacagactatttacttgtctttgtttgtccttgttattcaacctggcacaagcacaattacccatccccgaatatcagaagggaaaggccattttaagtggtacaatcgccaattaccatccgaatgataatctgatattcaagatcggagctcccaatatcgtgatgggaacagccgaaactctttatccgactgttgagtcagacggaaactttactattaatattcctctctaccatcatacacaagtacggatgatgataggaaatgctgatttagtcattctgctaagtcccgaaaaagaaacaaatgtagctatcaatctaagtaatccaccaggaaaacagtttgtatttagcggtcaatatgctaccattaacaatgaatggtgccagccggaactgataacaaagataccacctgtttatagtgatggcgacctattggattccattgtaggcattagtgccaatgaattcaaaaaacgatgtatcaaccaatacaaacgatatgtaacgcacaacaacgcacagttacaattcagcgaagacactcgcacactcgccaatctctcatgcgcatttgattgcctggaaaatctacaggccacccactattgcctgcaaactgcttatcaaaagaaggaaaacattacgcgggaacaagcttttgctgcttttcttgatgtatatttgcctgatgatttccacaattatttgaaggatttcccagtcaatcaccctttagcactctattgttataattaccgcaatgtagtcatggatttatatgatacccacaaagacccactcgcttacgaaaaaaatctattgaaaaatgcaccactcactaaagaggaacagacacttatccatcaatatgaaacggctttcaaagcaggtatctcctttcagcaagaaagcgagctaatggcacttagtgcaaaatacttcaaagaaaatgacctattcagatgggagtcattctccaaagcaaaagaacgtcttagtaatatcatacaagacagcacaagtttaatagttgactacatacgagcaatctatatgcgttccagtttttacaatttacaacctctgacaccccgacaagagctcatggcttcggaaattaccaatcctattttcttaggtatcattcaagacatgaaccgccagatgcaaccccgacagaaaacgataacaaagaaattcactatttgcgaagcaccacaagttccggaaaaggaactgttgactgctctcattgcccaccacaaagggaaggtacagtttatcgacttttgggctacctggtgcggtggctgccggcaaatcatcaaggaatatgaaccactaaagaaagaaataggtgaagacaaagttgctttcatttacctcacaggccccagttctataaaaaagacttgggatatactaatacaagacattgccggagaacattactggttgaacaaagaacagtggggttatctttggaatcattttcagatgacgggattaccgatgtacctgataatagataaaaaaggaaatatcgcaaaacaattcacccacgtaacagccaaagagttgaaagagttgctagagttagaagtcaacagataaggtgcctagctacaaatgcaggaaacaggttcttcgtcaaatctggtgaaaagttgtcctctattcatttatataattcagtagatgcctgtttttctaaaggatttaccacccaatttgacaaagagccgaaagcaatgagaagtgtgccaaagctccttaataaacaaagaatcacctttaccacagataattgtgataaaggtgattctttgtttattaaggttttgtattgccctcttatatcgaattcacattgatctacaatatatatttagaaattaatcatgtgcataatcttctccgtcgcaccggcattgctagtcacataataaccggcattcgttccggtttcccgcaaaaacgcctcatctgtcaggaaacgatccagcaaagttttcagctcatcatagtctttgatagaataggcaccttttgcttccagcaattgaacagcctccatgaatttctgatacttcggtccgaaaatcaccggaataccatatacagccgcttccaaggtgttgtggattccgaccccgaaaccaccgccgatataagctatttcaccatagcggtaaatagaggataacagaccgaaacagtctattataaggcaatccgctttcaatacatttctttcgtcagcacgggtatagcgcacatacggacgtttcaatttaccgatgatctcaaccaggtgattctcatcgatcacatgcggagcaataatcagtttcatttccggatgattattgaaatattcgaggaataaatcctcatcaggtccccatgaacttccggcaacaaaagtaaaagaattgtttcctttaaacttctccaccaacgggagctctttagcctcttcgcggatttgcagtacacggtcaaaacgggtatcccccaccactgtcacacgactgatgccgattttcgacaaataacgtttggatgcctcattctgaacaaacagatgatcgaaatctttcaagacattgcgataagtgccaccgtaccatttaaagaatatttgttcgcgacggaagatggacgacacactatataccggaatacggcgcttgtgaagctcatccagataattcttccaaaactcatatttgataaagaacgccatgcaaggatttgcaatatccaggaacttcttcacattcctcggcttatcaaacggcagatagcagacaatatccgccccccggtaatgcttgcgcacttcataaccggaaggagagaaaaatgtcagcaatatcttatagttaggatatttctcacgaatcatttctatcagagggcgtccttgttcaaactcccccagtgaagcagcgtgaaaccaaatatactgttcccctttttccacttgttggcgtaagagttcatacaccacccaatgccccttcatcatcttccggggcttgcggctaaacggagcagccaaatggacgataaagtcataaatgactattgccaggtcgtaaagcatagtactgatcgattacttcaaaacctctaccgctcgtttcatacgagctatcgtctcctctttgcccaatacccaagaaatatcgaacatgtgcgggccttttccttcacccaccaatgtcagacggaaagcattcatgatattaccggtatggtaacctttctctgcaatccagtccataacgactttttcctgtccttcaatgctaaaatcttcaataccggcaatcacttctgccaattcggtcatacattttgcagaatcttctttccagcgtttcttcaccgtcttttcatcatattcggtaggagccacaaagaagaagctacaaacatcccacagttctttaatgaaacttacccggtctttcatcatgccaaccacagtcactaccttttcgaaaggagcctctacgccttgttctttcaagaaaggcaagaacagttccgcaatttcttcgttaggtttctgctgtatatattgatgattgaaccatattccttttttatagtcgaacttagctcccgacttgctgcaacggtgaagatcaaacaatttaatcaattcgtccatcgacatcacttcctgatcattgcccggattccatcccaataaagccaggaaattaatcacagcttcgggtaaataaccggattcgcgataaccagaagagatttctccggatttcggatcgtgccattccaatggaaatacagggaatccgagacggtcaccgtcacgcttgcttaattttccattaccttccggtttcaataacaaaggcaggtgagcaaattccggcatcgtatcttcccaaccgaaagcacggtacaacaacacatgcaaaggagcggaaggcaaccattcttcaccacgaatcacgtgggaaacttccatcaaatggtcatccacgatatttgccaaatggtaagtaggcagttcgtcagccgatttataaagcactttgtcatccagaatagatgagttgattactacttcgccacgaatcaggtcatttacatgtatatcttcattcggttcgattttgaaacgaacaacatattgtttgccttcagcaatcagtgcatccacttcttctttcggcatagttaatgaattgcgcatcataccacgggtagatgcatcatattggaagttagcaatttcagcacgcttagcgtccagctcctccggagtatcaaaagcgatgtaagcttttccattttccagcaaaatctgcacatatttcttgtagatttcgcggcgctccgactgacggtatggaccctgttcaccaccgaagctcactccctcgtcaaagtggatacctaaccacttaaaagattcgagtatatactcttccgctcccggaacgaaccggttagagtcagtgtcttcaatacgaaatatcaagtctccgccgtgttgacgtgcaaatagataattatacaaagctgtacgcacaccaccgatgtgcaatgctcccgtaggacttggagcaaaacgaactcttacttttctttctgccataatttgggttagtataggtaaatcgtggcaaaattaaacctttttttccacactattgtttttttttgtacttttcgcaaaaatttcagtggatatggaacatttgaagaagaaaaaaagattttcatggagagatttactatataaatcactgctgtttgtaggcactgtggcgctgattgtttatttcctgccacgtgacggaaaattcaattaccagttcgacatcaacaagccctggaaatacggacagttgatcgctactttcgactttcctatttataaagaggatgcagtggtaaaaagggaacaagatagcctgatggctttcttccaaccttattatcaactggataaaaatatagaaaaagacgcaatcgccaagctgaaagagaattaccatacgaatctgaaaggtattctcccttccatcgattatttgcggtacattgagcgcactttaaaagaaatctatcaggcaggcatcgtttcgacagagaatatacagctgcttcacaaagacagcacttcatctgtcatggtgattgatgacaaactggctaatccacaggctaccgagaatctttacacggtaaaaaaagcctatgagcacttgctgtcagcagactctactcatttcaaccgggaaattttaaggcaatgctccctgaacgaatacatcacccccaaccttacctttgacgaggaacgtacccaggctgccaaagaagaaatcctgaacaactattcctgggcaaacggattagtagtcagcgggcaaaagattatcgaccggggggaaatcgtcagcccgcatacctataatatcttggagtcattacgcaaagaatccatcaaacggaatgagtccatgggacaaaaccgcctgattctcggcggacagattctgtttgtaggaatgctgatgctttgttttatgctttatctcgacctgttccgaaaagactactatcaacggaaaggcagtctgtcattgctattcacgttgattgtattttacagtgtcataaccgctttcatggtaacacataatctatttaatgtgtatatcatcccgtacgcgatgctacccattatcatccgtgtttttcttgattcgaggactgctttcctgacgcatgtcatcactatattgatatgctccatatccttacgctttccgcatgaattcattctgacacagttggctgcaggattagtggcgatattcagtctaagagagctatcgcaaaggtcccaacttttccgaacggctttattggtcatactgacttatgcagccatttatttcgccttcgagttgatgacagagaacggtctttccaccgacttttcgaagttgaacatacgaatgtacacttacttcatcattaacggaatcctgttgttattcacttatcctttactgttcttattggaaaagactttcggatttacttcgaatgttactttggtggagctttcgaatatcaataacgatcttttgcggcagatgtctgaaacggttcccggaaccttccaacattccatgcaagtggctaatctggcagcagaagccgccatccggattggagccaaaagtcagttagtacgtacgggagctttgtatcatgatatcggaaagatggaaaatccggctttcttcacggagaatcagtcgggaggagttaatccgcataagaatctgaattacgaacaaagtgcgcaggtcgttatcagccatgtgacggatggattgaagttggcggataaacacaatctgcctaaagcggtcaaagactttatcagcacccatcacggacggggaaaaacaaaatatttctatatttcctggaagaacgagcatccggacgaagagccgaatgaagaattgttcacttatcccggcccgaatccgttcaccaaggagcaggctatcctgatgatggcagatgccgtggaagctgcctcacgcagtcttcccgaatatacggaagaaacaatcagcaacctggtcgacaagattatcgactcacaggttactgaaggttactttaaggaatgtcctatcactttcaaggatatagcgactgtgaaagctgtattcaaggagaaattaaaaatcgcttatcatacccggatcagttatcctgagttaaagaagtaagcaaacctgcgcaagcatcttcaagaacatcaagtacatattcaaacccctcggcccctccataataggggtcggggacatgatctgcaggaatacgggtacaatactccgtcatgcgatgaatcttcttccattcttcgggagaaggagctttgtctttcaagtcatctatgttccggtcgtccataccgattatcagatcaaaattataaaaatcttccgtacggacggggcgagaacgatgcaccaattgataaccgcgacgggctgcatgagcacgcatccggctatccggcaattcgccctgatgataagacaagattccagcggaatctatcacaaattcgttttccagtcccgcttcttttattaaatgaagcattacgccttcagccgtagagctacggcagatatttccaaggcaaacgaaaagtatctttttcataatttcacttttaacagattcaagaataagccaaatgatcatttatttttagacataagaacaaaaacatatttcagacataagaacaaaagaacataaaggctgcgctttgaaacttatttctgttgcttattgaacggctattttattttttgttcttatgttcttctgtctgaattaaattcccatttaacgaacagtcatttacaatgagttcagtatctgattggcccggttcacggttattgcggccgggatttccggcatactacccaaattgaacggagcaagcattttttctattttctttaatccggccttatttccttttttctcaaattcctgacgaaggatattgatcttctcatgcgcctgtattccttcaatcaaacgttcgaaacgaatacagctacgagcacccggatatacaaggtaagtatctccgcctgcccaactacggaaacgggaatcgagcagcggctccaatggccagctgttatatgcccaacgcagataaccatccagatgtttcttagatgaataataactcatccagactgcttctgcaggatcagagaaagtaaacgtgttgggatgggcttccgtacagcaggtataataattagtacgcttgttctcggctacacgacgcagacgcacttcttccgggaagttctgtccgatgacaatacagtaatcatatagatcgggctcaatttcttcatgatagtttccagccaacgatactttaaaatccggatcagctttacgaatcactttcaacgtcttctgcattacttccatcggacgttcgtccatcgcaatagcacagatatcaaaccatcctttttctttcagatgcttggagaaagaggcaagcatcgctccccacatttcttcataagccgcttcacccggtgcagttttcacgaattgcaaagagttggttgcctgatcgtagtattggaatgacaattcccagggaaccattgagtaacaattaatctgtttatcaatgcctacactcatcataaattccacccaacggtcgaagatagtataatcaaaagcccatgttccatctgcccgtttcatccaggtgaccattgtatcaaaataatcttctgtctgaccattccagggcttatgcgtcaaagtagccgtgataatcttctgtccggcatctgccaacattttcatcaaaggacgcatagcgtcaaaatgctcctggctccataaaggaacctgataataacgtgccactgcataaggactttgccataaatccaagtgataagcccattccgaaggttgaggaagttcacgggaagaaacggtaatttcgagattcaggcgttgcaataaacgcgagccatcattaattaataactccccttgataagttccgggagtagccgattgaggaatccaacactgcacccaaaccggttgaacagtacgagcgggcaaagccatcgttttcaggttggtatcaataggatcggccaccaataatgaatcataatctatagacttccgatgtccacaggcacctctcccatccttattcaattcatccgtcatcacataacggacaaaaccacctgtaaatgcatctttgggaagaacatttccctttttgtctttaaaatcaccaaagctgaaattcaggtctttcagttctacgcctgtccacacaacagcttgcgcgttcacacgttcgccacgccagcctttcagggaaacagtctgttgtttcttcaactgcgggagttgatgttttgcataccgtacatctgttgtaccccaagaaacttgggtggaagtcaccgctacccactctttatcagaaggtgcagtaggatcaggcaactcctgataagtcagtaaagggaacttcggttgtcctgtcggaacaccacattgagttactccctgctgggctaaaactgcacccacgctaaagagacaagtcagagaaaaaatagtaagtcgtttcatggttagttaattaaatgattaaaggttattatatgggggaaaattattaaatcacataggatctacatcataatagacaatcaaagatttatagcgttcgtccgccaacatctcgcgctgaatacgtagcaacaattcccgtgcacgtcccattggggcattctgctcaatcttgacaacgatcttcttgataaacaaagtctggatacgggcaacaggaggtttatccggacctaatacccgattgccaaatacagcccgcaacttatccgccatcactgccgccatctgatccagcaacgcttcattatgatttttcagataaacatataccagccggtaataaggaggataatggaacatctgacgttccaccaattgtccgcctaccatatcttcataatcattggcaatgacctgatgaatgataggatgatcgatgctcttggtttgcaataccacccgtccgcgtttattcttacgcccggcacgtcctgctacttgtgccatcaactgaaaagcacgctcataggaacggaaatcgggataattcaacatggtatcggcattcaatatacctactatactgacatgatcgaaatccaacccttttgataccatttgggtaccgatcaatatgtccgtctttccctgctcaaagtctgcaataatcttctcataggcggaacgggtacgtgtagtatccaaatccatccgggcaacggcagcttccgggaaaaggattttgatgtcgtcttcaatcttttccgtaccgaaaccacggttcaccagttctgttccctcgcaggcaggacaggatttcggcagttgatacgtataaccgcagtagtgacaggttaattgattgattcctttatgataggtaaggcttacgtcgcaattcttacacttaggcacccagccgcaggtacgacactccaccatcggagcaaacccacgacggttctgaaagagaatcacttgttctttctgttccaaagcctctttcatatattgtatcagaagtggcgagaattgtccgaccatccgctttttgcgatgcagttccttgatatccaccggaataatctccggcaactggatttctttatatcgttctttcagttgtacgaaaccatattttccctctcttgcattctgccatgactcgatagagggagtggccgtacccaacagggttttagctccgtacatggcggccagtacaatagccgcgctacgcgcatgatagcggggagcgggatcttgttgcttatacgtattttcgtgctcttcgtccacaatcaccaatcccagatttcggaaaggcaggaaaatagaagaacgaacacccagaataatatcatacccgttctctcccagttgcttccgccatatttcaacccgttcagcatcggggaacttagaatgatagatacccagacgagcaccgaagacccgttgcaaacgctccgtgatttgagtggtcaatgcaatttccggcaacaaatataacacctgctttccctgacgaatcgcttcttctatcagatggatataaatttcagtcttaccactggacgttaccccatgaagcagacagacatttttctcttgaaaagactgtacgacttcatcaaatgcacgctgttgaaactcattcaaaggatttaattcgacaatctccttctcctgcttatccaaccggccgatttcatggtagtagatttcaaaaatcttcttatctaccaatccattcaatacagaaggggccacattagtccgctgcaacagttctttcttggagacttctttcggagttcccgctcctaaaacaccggaacactccacatacttcatgagtaatgccaactgcttcggagcacgagacagaatatcaaacaggatatgaagccgcttttcatccgctgtacccgcaagccgaacccgtgcctctgttttaggtttataagtacgcctcaactcctcctttacgaaaatcgcttctttatcgagcaaagacttgatgaccgtaagaatatttttgataccactgtccttctccagtttagtgacgcactgttgcgaatctacggcaagtaaatccaaaatacgttgctcacgttccggcaatggcgcatccgcttcaaaatcaggattatattcaacgatcgtttcactctccagtttcaggccggagggaagtgccgctttatagacatcgccttgtgtacagagataataatcagctatccactcccaaaatttgaattgagcgggtaacagaatgggagaagcatccagcaatgcagatatatctttcacttcgtactccgttggagcacaataatgaacgttaaggacgatagccgtataaaacttcttccgcccgaaaggaactaccacacggcagcctatcttcacatcttccgcacattcatccggcaaagagtaagtaaaactcttcggaagcggaagcggtaatatgacatctacatactttttcattgcagctacaaaaatacaataaaaaaatggggatttaaaagaagggagagagaacacttaaaaagaaaactctacttcatacgagaattggaagaaatatattcaagagcgcaacaggacaatcccaaacaaaaaagagtttccggttatcggaaactctttttcatatactatgtaaagtgatagactacttaaaaaatataggccacagatacttgccaagtcttagtcttataagaagcatttgttccttcaatatcagcagtattacccaatgggatattgtaattagcacccacctgcaaatggttcagcaacttcaaaccggcacccacattgatacctacttcagctttcttcttatcaattcccgatttcttttcaaaatcgaaataaaagtcaggacctgcagccagataaataccagccagacttcccaagccaatggtatatttcaggtttacaggaatatcaataccgttttgtttaacagtaatatcatcattcccttctgaaactttgataccccgttgagcaaaaagcaaagatgcatctactcccaaccctacgattggaatattaaactcggccatcggaccgataaagaaacctgtgaaattatcctttttaaagttttcgctcacattagagaaactcgcctttgacaagttcaaacctccctttacaccaaagtgtatctgcgcctgagcaggcattgccatagctatacatatagcaatcattaaagcaccaaaaatctttttcataaatttacgtgtttataattcgggacaaagatatatatttacctcaaatccgcaactacgcgcctaatatgatacagaagcgaaaagaatctgcatcgttagtaaaaagggggcacagtgcatcgaatgtcaccataaagacatataaatgccccttaccccaccatgcgacttgaggcaatacgcaaaatcacgactataagttgtcggtgttatccaaagtcattctggaacacattggcataagcattgttgcatgaatagatattcagcacatacttccttgatgtcctgacccatttggctggcacagagatgaacttaaagacaaacgtcttgatgcggcttgttgctttgagtccgaacctcttcacgtcaagcctcgccatgatgaatttatagaagttgcgtatgagtgccataagcagaagaaacaccgtgttttctcccataaaggattttggaagcctgttccagccgaatccgttattcatatcatcgaagatgcgttccttccctccacggaggttatagaattcgacaatctctttctcggaagactcgtagtcatttgtaaggatgcagcggtaggtgtattctccttcccacaggtcgagttcgccgtctatccgcttctgtctttgaatcacaagacggtatgccttccctttccatttctcgatgagaatggaggccagctcaaactcaatgccgcccaattccactttcttccaacctctgagggcaaagatgtcattgtagagcgaactgcatcggttagcacggatatagaaggtcttgcagtgtttagcaatctcttccactatctcttcagaacacgagccgcaatcagctctgaaacggttgataataagcttgttttgttcaaacctttcaaagaacctcttcagcgtgtccttctggtggaaacggacatttgtgttgccgtcgctgttctcaatgccgacaatcaagttgccaataaccgccacgccagggcgataaccaaggaacttcttgtatgtaggcttcgcatcaaacttctcagcctctatgaactggtggtcgaagtcaacgtcatacccctcgccctctttcagctgccctgtggacaataggcaattgaggagcagtgtattcagcttgtctgccgtgttgaagtcgtaggtcttgccagtgtcggatgtgtaggaaatgttatcctgggtcagttcctttatggctctaagaatcgtgtcggcactgcatgtgcgaagtgtcggatgaagcgaaaggtggtacatcagatgagtggtgacatcctcgatgcatgagccgccacaaaaataaacgctcataagcgaacggatgatttcgctgtattgataaccatacagcctgcatctcataccgagggttgagtcgattacagatgagagtctggagtcaaattgctccattattgaaaatattcctccaaaaggagtgagtttctcggatttaattgctacctttgccatgtctgtcgggtttgatacatattttgatttgcaacactaagataggtgaaaaatctgacatggcaaattcctgagcaactttttgttgctcaggtacttaaaaagttatatttgtaatagtgttgcggaattaaggatttagattaaataaacacaaattattggttttttgttcgctcaaagtcgttgttgttcacccaatcctgctcccgtacctttatatttacttttctgcaaattaaacttatagtgaacagtcagtttcacttcctgcgtattccgctttgtctcccggaacattttaacccggtcgtcatattgagtattagcatccctcatcgaatgaaacaagtcgttcccctccagcaagcagtccacacgtccgttgaaaaacgatttatagatacttgtgctcaagcaactaacgggccttgtataacagttctgatacactcccttgcctgtatattcaccattcaagcgaaatatatatccggcaggcaattgaaatgaattattccaccggatcccgaatgtcgttccgctcatattcttcatttcattcaaataaccgattttgaaccattgagagttgagggaagccgtccactccggtttccagcatccgatacttggagcaaagaccagagaagcagtcatttcatcccgatggtcgacattgcgaaacttaataagagagattttcggatcggaagtgatctgttcgatagaaaacaggatatcatcattataccgattgtagccgacggagagttgcagatcccgatagatagcccgcatctctgccgcatgaatataggtaggttgcaaattgggagctcctcccagataggtaaaccggttcccgtaatgaatggcatttttcaactgttcataatgagggcgggcaacctgaatatgataccccaatgcccactgcacctgccccatcgcccccttccagtgacaaggatggaaacaggttgcgatagtgtttgctctcatccgactgataaagactgttttcatagaaatcataatacacatcttcataacgaagtcctgccgaagcatttacaccacccaaacgataaacacaatcaagaaaaaaagccagattcttctctctgattttatcactggttccctctatttcatcaccgaaccccgaaaagtcgctggtgcgatgcgtataactatattcactgcctccggaaattcttccacctgccagcggataagataaaactaactttccggcatacaacttattatcggttctgctaagagtcgttatgtagaaatcatcataattgcggctcaattcgctaatatgctcctcttccttattcttgccagccaatacatctacattcaaatccatttccagactgttcacctctccatgataatatacattggaatgatggctgggatattctttctcaatcgcaaaggtatacgtattccacacatcgtataatgcttgcccgtcatagacctccgtccggttgtcattgttcattttattgcgtggggcagaagtcaattcataagtagcgcccagagagtgtttttcatttatttcataattaaatcctatctgactgaaataactgatatttcttcctaaatccgttgtttgagctttctgctgccacgaagcatccacatacgtatcttgtaccgattctcccgtttccttgagatgctccaaacgatattggaaagctccgaacacatccagtcccttccggtgatattccatattgatctgatcgttgtttcctaccttatgcgcataatccactaccgagcgcactcccactccaaagccatcgtttttattcccggttgttttcaatttcaggacagctcctaccgatgctccatattccgctccgggattggttatcagttcaacctgcttgatattttcagagttcaaacggtcgagttcgtccaagttgcggactttcctgttattgatatagataagcggaacgccttttcccaacacttccaacgtgccatcctgcttcttcaacactcccggcaaaagcccgactacgttcatggcagtacctgccttacttaatattgtattctccactttcgtagtcaatcctccattatccaaccggaactggggaagacgctgcgtaatcaccacctcatccaacatcaaatcatcaggaatcagcgtgatattttcctccacagaagacgcaaccctctgaacgaacttcttatagcccacaaaagacacggacaacaaataaggcccggcatcctgtgccgttattttaaacacacctttgctatccgtcacagctccgcccacaagcgcagaatccggcacggacaatagtgcaaccgtggcatactccacaggaagctgattttcaccaataacccgaccgctaaatatctgtgcagaagattttaaagacaccatcaacatcagcgcaaacagtaaaatataatttgttttcattttttcttttcgtttatgtaagtgattagtaagtacccggtagggcatagaatcccccttaccaatatcccgcaagggagattgatataactatttgcatagacaggagttttccaaactatccgccggacggcagataggaaagagaaagtaattagttaatagaaatcatcagtaagtaagaatatcgttatacagtccttccaatcgtttgcgcaaatgcttgacggcataatgtttgcgcgaaagcaccgtatttgcagaagcaccggtcgcttcggctacctcttttacagaaagtccttccagctccatcagttcgaaaaccgtccgctgttcggcaggcaattcaccaagagctgcttccaactcctgccataccagcgaacgcatatattccgtttcaggcgaaggagccagatcatcattggcaaacaacacttccgaaaattcactcaagacgctttcttcctctgcgtaggcagaaacaggccattcttcttcacttttcttttttcccttattgataatcgtgtttcgtgtcactctgtaaagccacgacgtcacctgctcaatcggattcaaagtgttgctgaccgcttttaccaactgataaaatacatcctgtagaatatcttccgcatcttccttactggaaaccctccggtggataaaggctttcagttgcggctgatgttcttcgatcagccgctccacatcgccttcgtgccctttttgcttattcatcttttttcgaagagtctacattttcatccatctcgaagtctttatccatcccgaagtcacccctgttaaagaagtcgtctctaccccagggaccgaatcccattttcttccttttattaataaactccttgcgttgttccggagtcatcttcatccatttctcacgaaccggattcattcctcttccgggcattccaggcatccctcctccgggcctccctcctctacggccaaaaccgaaacttccgaaaagaatacgcatcaggacgagcaagcccaatgcctgccacagactaagtgcaggcagaccaaaaatcacgggcatcagccaattccacaataacatgactattgctcctattcccgcagctacaaccagccaaagaattacaaacacaaatggatttctgaaaaaagaaaacttaccgccacatcttccatgaaatcttctattaaaactttttgttgccattatacttcatttttttaattcatcattcttattagttaaaagagccctctactcttatagacaatcgagatgaagaaatattttatgaagttacaaaaaaaataatagtacctgcaattttttgtataattgcaacgatccatacagtagtttcaccggttgttgatgttcccggtcccggttattcagtaacatactacgagtagaaaaaagataatccgattttacttcctgattttcatacagattcttttcagccaacaggtacagcaagtagtctgccccaagacgagttctttttccaacttccgcaatcggtcacattgtttcaaccatttgatttgtaaggtatcataaaggattccggctgctttatatcttgtgatttctttgtcttgtttgcctaaaagtgataggtatattgaacaaagttttgatttatctatgcaatatcgttccagtttttcgatatacatcaaagtagcccctctttcatttcgactcataaactcctgaacactgtcatcactgatgatgtcgatgcccggcctttcgtagtccacagtgatttctcgcatctctatcaagacccagatatattctgtctcgaatccgtactttgcggctgcctcttctatactaatccattgtgccatagcgtttgtttttcatgtgtgatacaaataagggatgaataatattttattcatgtatattagtacaacgggcatccacgcttttttgcagtctgccgattggctaggttaaaattggggcaatttattactggccgaatacaagaaagacgtagatgctgctgtaccattatccgatttcaaggctagctacaccctccagagaacaatgatgacagcagacacccacgtcaatcgtttatatataacacatctcttacgaatatgttgatatacatccgttcacgtggagtatctaccgtatcatctccctctgtttgaattagctatttctgaaatcgagagataatacgcttttactccatataggaaataaaaaccgcttcctgcctgttccatcacgctgatgggctgaaagcgtacggcaaagatatatgttttttttgaaacgcagtcgaaatatggaaataaatactggaagttatgtattaaaatgaatctgacaaaagacgactctacttctcattcttgattactgaaatatctctcacaaataaaagttatagcggtttttactctcacactctcacccattggttcaatccctttattcatcggcattacaggtgtgggagtaaaggtaagggcatggtgagggtaactttttaccctcaccatgcaacaggtttctccatacgaaagttccagttgtagtgtactgaataagttgacacttctcaaattagaaattcacatggaagaattaaaaaagaagtacactccttacacagaatctgaacgaatgtcgtatattcgtgagtatttatcgacttccgaaacgaaatatcagtttgccaagcgtacgggtatttgccgtcgtttgctgattctttggcttgataagtatcatataaatgataaagttatgagtacagaacaaccctctttaagaaaagactctgatgagtctctcaatgaactggagaaagaactcgctgcattgcgtgccgaaaatcgcaagcttcaacgtgctcttcaggaggaaagtcttcgtcatgaagcttgtgaggaattgattaatcttgcggagtcaacctatcacatcaaggttcgaaaaaactccgatgccaagtaatcgacaccttgtcacaggggaactgtgcccgtcatatgcgcggcagtctgcagttcctctgtgattacttcggcataaccagacaaggttattataagcatgtcaacagaaaaaaggaaatagacatcctcacatcaagcattgtgttgtattgtaatgagttacgtaaacttatgcccaaggctggtatgcgtgaactctatgcatgctgccttcgcaagtttggtgtcaggatggtcattggacgtgatcaatgctataatatttttcgtgccaatggcctttgtcaacgtgtcagacgtgtgaggccaaagacaacaaattctaatcataattattacatttatccagacctgctgaatgtcacgcctaaatttgtagctgacacattcggttcaatggttgtagcggacataacctatgttgccacgtgccagggatgggcttacctgtcccttcttaccgatgcgggcagtcgggccatatcggatatgccctgtgcaaaacactcgaagcggaaggtcctttaaaggcacttaggatggctatggacttttataacagatacaatgttgatttgaataatctgatacaccattctgaccggggagtgcaatactgctcaaacctgtatgtaggtatgctcaagaaacatcatattaatatcagtatgactcagtgtggggatccgctacataatgctctggctgaacggatgaataacacgatcaagaatgggtggctttttgactgtacagatgacagctttgaacaattggataaacgtatagccgatgccatatatgcatacaattatgttagaccgcatcaaggcatacaaatgagaactccgatggaatatattcgtaaatgcagtggaaaggtagctgaagtcccgctcgtcgggacgggtgctcccgcccctattcttatggattacgcaagcgaattttgataatttctcgaaaaaaaagcatccgtcctaattacagcgaacataatcgtaactaatttcgctctaactgcattcagaaccgacatcttattttttccctcttcgacctttctgtcataatatttcttcaatggactatttttcacttgtgaaacagatagtgccgccatatgtagcaaatgcttgatgctcttgtcagccctattagatactctatttttagaacgttggctacttcctgacacatagacgaacggaacaactcctgcatgacagcaaaacttcctgggatcagtaaaagaagtgaaagcatctgtttccatgatcatcttcagtgcaacacgttccccaactccatccacagacatgagtaaatccatttgatgagcaatgacaggtgcctgatttataagttcttttatttcaaggtctatttgtgctatgtaatccgtaaatgtattgataatcccttcaactctattgcatttagcaatatatattgagtgttccatatagtctacctgatcttttagctgggattgatatttagccctatctgcaacaagcatactgcgttctgttgataagtttttgagtttttgtattataagctctgatgcggtatacggttgtaggcaatcattatatctttctgcatacattgctattcggcaggcatctattttatcatttttgccacgaggtattccatgacaatattttattttagctgcatcttccaaacataagtagactcctatactttttgttgcacagaccaaaggataggtatattgccctgtatgttccgcacagacaaccaaactgtcctcagagaggaaaaatttctcaaacgttcttgttaaccaagatttaatagaggatagatcattaggaataacatcataaaggatgtccttaccgttactccttaaacataaatccaattttttcttactcacatcaactcctaaataaaaaactttcatacttttgtttttgaacattaaacaaaaaagaaaggacctgaacttgacctaataaccttaaacaggtttactgaaattcttatatgggtttgagttcaaggaaggagcaaaaggaccgaatagggacttagacttgacttctattgccgctgatggttttccttttgctttcctttcaatatcaattcaaagataaatattttgatgctgcaaatctaaggttgccgctagggcgatccccgagcaaagagtttttgttgtttaatgaaagtttacagcccgaagtcttgcacttataagagaagatacataattttgcaacatatctaaaatgacaacttatacaggaattacaaagggacaagtaaacttatttaggtttaaaaaaatattgagtaaactaacttaggtataacaagcgaagttgtcaactaaatccagtacagtacaagtccaatagtacgaattttagtttcatatagtgaaactaaaagtttctcggtgtgaaaccaatagtttcatatattgaaacaaagtgttttttcaagatgcgcaaatatagtgcaaacctattaaaattcaaatagttataaaactaatgttttaatcggatgtggtgaataaagctaaatagagcatatttgggagtgagttatgttacttatctgttacctcttccaatttgcctactaatcggatataaggcattagttttcaatatattgcattattcttcataacttcaaatacctcaacagtaattaaatttgtaactaaaaaagttgagttatgagaagtacattcagagtgttgttttacactaaaaatcaatcgattaagaatggtaaagtacctgtaatgggacgtattaccatcaacaagaccacagcttgctttagctgtaagaaggaggtgtctatttctttatgggacgccaaagctaatagggctaaagggaaatccgaagaagctagaatgttaaaccaggaacttgataatgccaaagcccaaattgccaagcattaccaatacatatgcgatcatgacagttttgtcacagccaagaaagtctatagccgctatgtcggttttaaagaagattcccacacccttatggagcttttcagggaacagcttgagtcatacaaggagaaagtaggcaaggaaaaggcaaaaagcacctatcttggtttagtagccgattataagagcgcattgctttttttgaaagacaaaaagaatgttgaggacattgcacttgatgaacttgacaaagattttattgaagactattataattggatgttgggcacatgcggctcggccagttctacagcattcggacgtgttaataccatgaaatggctaatgcatatcgctcaagagaaaggtttaataaaagttcatcccttcacgggttttggatgtaagccgggatataaaagacgttcatttctctctgaagaagaactgcagaggcttatacatgtagaattgaggtataaacgtcagcaggctatgcgtgacatgctacttttcatgtgcttcacaggcctcgccttcgcagatctgaaagcaattacttataagaatatccatacagattctgatggtggcacatggctcatgggaaaccgtataaaaacaggcgtagcatacgtcgtgaaattattacctatagcaattgaacttgtagaaaagtataagggtgataacaaaaagaaagattctcctgattgcgttttccccgtcggtgattatgaaaccatgaaaagtagttttaaggttttagggaaaaagtgtgattgtaatgtaaatatcacccctcatatcgggagacatacctttgcagttttggctatattgaaaggcatgccgttagaaactttgcaaaaagtattaggacacaaatcgattctttccacacaagtctatgctgaactgatcaatccgaaggttggggaagatacggataggatgtgcgacaagattggttccgtgtatcgcttggccaattagaataagtatgaaaaaggcactataaaatattttgtgtaaatgtaaaatacgggattcagtatgggttccgtattttttatttaatagctttgcaaaatgaagaaaattatgaaagagaagaatcatgtagtgcctgatgaggtattaagtaaggagttccttagccagttcaagacagaagctgatgtcagcaagtttctgaagcagttacacgcgcaggtattggagaaaatgcttgaaggtgagatggatgcgcatctgggttatgagaagaattcggtttccggtcataacagcggtaattcccgtaacggcagctaccccaagaaaatccaaactgaacacggtgaagcggtcatacctattccccgtgaccgtaacggtgaattcaatcccatagttgttcccaaacacgagagtcgtgggctttccatagaaaaacttgttatctccctatattccaaaggaatgagcgtgtccgacattgaagaggagatgcgtgaaatctatgaaatagaactgtccacatcagccatttccatcattacgaacaaagtcaaccaggctgctcaggaatggcagaaccgccctttggatcctgtctatctcatcgtttggatggacggtattgtattcaaggttcgtgacaacggaaaaatcatcaacaagactgtctatctctgtgtcggtctgaaacagaacggcttgaaagaagtccttggcatgtgggtgggaaaatcagaaagttcttcattctggatgggtgtcctgacagatttgaaggcccgcggagtacaggacatactgattacctgcactgacaacctgaacgggtttaccgacaccatacgtgccgtatttcctcagtcttccacgcaaatatgtgttgtacatcaaatcaggaactcctgtaaatatgtcgtttacaaggacaagaaagagtttacagccgatatgaagaacatctataacgcgcccaacaaggaggctgctgccgtggaactggataatctggaaaagaaatggggagggaagtacccttatgccatcctctcatggaggaataactgggatgacctgactgttttcttccagtttccattggaaatcaggaaaataatctacacaacaaatttcattgaaaatctgaatggaaaaatcagaaagtacactaaatcaaagctttcattcccgtcggatgatgctgtgaagaaaatggtatacctcgctttgatggagattgagaagaaatggacaatgccgattactaactggggattgattatgaaccaatttatgcttatttttgaaaacagaatccagatataagagaacttataactgaatcccgtttctatttacacaaaattatggatactgccatgaaaaaacacccttcagcaaatgttgaagggtgtttttcgtattcaggcaggttgcttatttcaagtaacgcctgaaatctttatagttcttttttagtacctcgtatagcccgctttccggatagagcagtttacccccgacagaggtaattgaggtataaggtattgccttttcatcccgtagtgtttgtaatgtacgcttggaaacatgaagcatccggcatacctcatctccactcagataatgttcgtctgcaatcgtcggacgtatccgtgccgcagcagcctccagattttttcctgtccgtttgatccatccggtaagttccttgaactcttccgaatctttagtgataatgtctgccatactctttattttctttttttgattagtccttcctccagaatttgctggatgtccacttctttataaaagaattttccaccgatattagaataaggaatcagcccgttatcccggtaagtctgcagtgcccttttggaaatattgagagccaggcacacatcctgcgcatccagtcacttgtccggtgttacgggggctattttcttttgaaagtccatcatttgcacggacagcatacttagttgtttcttcaagtcctgataagcacttgtttcgataattgtcagttccatgatttataaattaaattgtgaataatgaaattgggtgcaagataaagggaatattactataaatcaatcgtttagtttccagtgtcgttaatagtcattaatagtcattttttgtcagcgtagcttttcttatactttttatttaacgggggagtcgtgaaatccgacatcccttatacaaatggtaactctttcatcttttttccttttttgccctgccacatttctttatgatatggatttcttcggagaaatcagaaatatgagtatctttggaacgaaatatagatttaaatggcaggcaatagccttccaattagatatagacataacattcgcagaatgtctcaagacggaaatctggtaaatttcaatgaatagaggctttttgtgtattgcttatgctatgctttgtcatagcgtggcttacacagctactattcataggtttaccagaacctccgtcttggagttgggtaaggccacgctttctcaaatacttctgccgaataatatttataggttaaatattatacttatggcaaaactccaattacttgcaatcactactcttgacggatacctcttcgacaggactgtttcttcccctttgtgggataatccgaacaaatatggcctcaccaaaatacgggaacgtgctacacagactctcgggccggatgtatctttcatctcattgacacaatggaaaaagaaaaatgaaggtatttatttcatagaagcggctccggatacaatttccgttataagcagcatgttcagatactggttggtggatgaaatcatcctttttgtcgcaccgtatatccaaggggacggcatacgtctgtttacagaaattcccggtccttcctcatgggaaatgaccgggaacaaatgtttcagatccggtatttgcaggctggcctacaaacggattgaataacctgcaattatcttcttatcctgactgacttggtttagacaggcatcttatatttctcccaatattttcttgccttgtccggtcctatccagttccgttggtcatcgattcccctgtccgagagttgtttcctgaccagcttctggatatcaatctcccctttggctatcttgatcagcagttcggaagcaatcgtattcagcattaagtccggattcagttcatccggtatctcttccatttcttttttcataagtcgcttctttattttttaggtttattatccttgaaagtcatctcaatcctgtaattgtcatccagctcgagtgatgcctcatacttctttcctttcttgctggtaaacttcagatatccggtacgtttccccgatagcagcaggagcatctgattatccgtcagttccctgccgttgaacgttctaaataacaggaacccacaattgggatcgctgcatttggcgaccttgttaaagacgataatcgtttctgctccgcatttggggcagttacaatgtggcaagtccggatggttaagtttcagggcaagcagttccgaggtgatttgttgggtataggaattgatgctctgagtaaatgtttccgtggaaactttgccggtttcgatttcatgcaaggcgcattcccaccctccggtcatgctcacgttggcgatcatcttctcttttacaatatcatatacttccagtcctttgggagtgggaatcagtgaccgtccgtttctttccacgtagtgtctggcaatgagcagttcgatgattccggcacgtgtagccggtgtacccaagccggaatcctccattgcctctttttccttttcatcgtccaatgttctgccacaaccttccatcgcagcaagcaggcttgcctcagtgaatatgggctgcggtttggttttcttgaccaatgtatcaataccgagcacgggcaatatttcgtcttcctgaaattcgggcagaagacttccttcttctttctcactgggttcgttatagatgcctctccaccccggaactttgatttggcttccttttatcccgaaaagaacgccgttacagtccgcttgtacggataccgtttctttcaggcatttgccggagaaagcctccaacatgcgtcccgcgatcatggaatagatattctgctcgtcaagggaaagcctctggggatagttctccgtaatgattaacgcatgatggtccgtcatcttgctatcgtccacacagtgccggtttaaaggctggttacagaggttttccgcatgccatgtgaaacggggatgttgcttaagcaggccgatgagggaagggacttgttcgaagatgtcttctgtgatatagctacatccggtacggggatacgaaatgtagcctccttcatataatttttgagcaatgttcagcgtctgttctgcggtcagtccgagtttggtattggcacttcgttgcagggcggtcaggtcataaagtagcggagcttcttctggaacctctttcttctccacttgcaccactttggctgtcgtctcttcatacacttttttacggtccacatcgagtttttccggtgtatcatatttcccggtacaggttaagacgagttctttccctgctttcgttgtccgtagctgtagcagataatagggtttggctataaaatccctgttgtccagatatcgacggcaaatcatgccaagtgccggtgtctgtactcttcccagagaatagttactcttgcctgcagccatgctcaaagacaggctggcattcataccgacgacccaatctgattctctcctggctttagcggcacggtacaggttgtcaaactccttacttgatttgaggctatcaaatccttcccgtatcgatttttctgtcatggaagatatccacaagcgtttggtttccttatgatatcccagatattcaagcacatatctcataattaactctccttcccgccctgcatcagtacaggatatcacttgatcagcctgacccaacagtttacggattacttccaattgtttcagagccgtcggatcagccttgtatccatcttcggttttaatctgacggacaaccagtttgaacgggtcgggaataataggcagcatctccttttccacatggacaatgccgtagtcttgaggcagggccaatgccaacagatggccgtaagttcatgtgacggcatatccgttcccactcaagtatccttcctgtttctccgttacgcccaggacccgggcaatgctgcgtgccaccgagggcttctcacaaatacaaattgttttcatgttactttcttttttaatatgaatgactatttaatttttacactcttgacctttgatttttctttccgtacccttttcttcggttctttgggaatggagagcttctctttcttttccgatacttgtatgctttccgtcagattcggcaggggtatttcctttgccggaaaacggctgattaaatccattgagattcctgacattcccgcattcagtttcacctgatctgccggttggaggtatttctccccgttctttccggttgccagttcgtacatgactgtttcacggccctggaggattccttcgtaattttggtaaggaaggtttgattcagacagtccgttctgctgaagcatcccacaaatctcatcgggtggcaatcctccgaacttccggtcaaaaggagaagaaagaatgtacttgtatgttgccagaagctgcttttcatggctcatatcgggacatccttcatattcctgcagttgtttgattttcttttcaatgctgttcagagctttgaaagtatgtctgtccttattctgaataggcatactacccattcggaccagttccatctggatacggttcaggctggacgtttcccatttattcaacagattactgcgattgctccggtaatcatcccggaggatagcgattggatttttggtacgaaagaataatccgatccgttttccccatgagggttcgtggaggttggacgcgctccagcggatcgtgttgaaacggtaagtatccatgaatctcctgaaatgattccggctggtaaacaggtttctgaaagtttgcaggaatgctttccttccggcagccctgcggctacgtggtatctctttttcgggaatgaatgtattatttatcagttccatatgcattataatttgggcttcgcctgctttttaacggaagcggtttttgtcttgacctttttcttttcattgccacaggacagtccgggcttgtcttgcggtttttcggctgtttgagcttctcctttcttagaaacaacaacaggcgggcttacccgatgatagttcttccggactccatccctgtttaacagtgtttgcgccaatgacctggcagcattttgtaattcatccatcttctgccggaaaggataatcccggtacaattccttttgccgggtaatctcacggatacctttctccacaaacaagaaatcctttttataggcaaacgattcgtctgccggtaaatgggcgtatcctctggctgctatgtcctgaagtgtcataatgttccggttacggatagagagttccaatgcgccggctgtgacaaaccggttgagattttctcccgtaggatgcatgtcgaaagtgacggacggcttgtaattcgccagaatttccatcccggcctgcggcatggtggtctgattcccgttggagagttccagcatccggcgggagacggtttctatccggtaaatattcaatgactccacatcctgcaaagagcttgagtagaaattgtccgctgtcgattgcaggtaatcccgaaactttatagtcccggaaagtccgtcattgaatacgcggacaccttgttccgtttcagctatggtgtagaactgtttggcttgctttcctgccgcaatcttctccatcgcatcttcgtgtgcaataaagcacttataagctggtgagtagtccagatcccggatattctctgccgtcagttccctttggcatgctctcaaataagccgctttccgtaaaggtacggagttgttttcagtgatgcctccgtaagaggcgatgaaactgagggctttctcactgtctttcgccggtagttcgctggtgaaaggaatatctttagcaggtattccctcaaaatgcagcaataagttatccggtatggttttctgatccatagcaatccgggcggtcagatccataaatacctgaaaagagtccttatccgtcggaacatacgacacgaccatgacagtcgagacttgattatccggctgtaacacaataaacaggctctttaaatccgctttagcggtgaatgtatcttttattttttccatccatgcaggcatgataatcagttttagatgcggggattatgtgacttgttctgacgggaagccgtctttctcttttccgaagccgccggtccggtcagttgcaacggaggacaggtcagtctgtatctcaggccaagtatcttgtccgcgagttgctgctgcctgttttgaatattgtagaatgccttttcactatatccctttttggattgcagttcggacatttcttgatccagcggtttaaaatttcctttgtgggtgaactccttatagctttcattagtattgaaatcagccggtaatccgtattcccgtataaagagcagggtgaatatctcggcattctccggcgttaccgaaagccggtaatcttccgtaaactgtttgaatgcatggtatgtcggctctatgggatagccgcctttcttcaacagctcggattgctctatcggatacaatggcattttcgccagctgcccgtagaaaggattggaccggaaaaggtccagatgcttctgcatgtaatgctccgtgctatggttcgggcaggaaatatagaattctctgattcgtcccagagcctgtacttccggagtgaagaaacggtcagccagatattgcaggtaacactgtttatagatggctccttcatccgtggcgggcaggtagacggctcctttgggagtctggagggaaatgatggggtctatctctttgttttgcaggctgtccgggataagcccgtaatcacgtttcaggatataggccgcctgatcccggatctgtgatttgaccttctcctgtccgcctttattttcagccggaatattctgcagcgcattgaactgggagttgaaagaattcttgtgtatgaacggaatccttctggttgtatagtctatcccatagattcctgcggtttcctgtaaggatagtaaccggagtatctgggcattggcaatactggggagcacgttataggaggaagcaaacttgtcataggcatcgaatgtcggttctatgcggtggctcctgtccagccgggcattccgcaggatagtcgcatccagatattgtgctttctccggcagaaaagagtttgtatataaggagaaggcattgggagatgcttggaatgcctttaccacttctgcgtccggacgggtcagcttgtacaggttgacaaactccggtttctcttcgtccgtaatgaagaaacggtcggccagatgttgcatataggcatggcagcatgtctttccaaagccggaatattcgaacagaagcactcctttggcggtttccacggcggtcagggtttccgacggatcgtcgtggagagtatcctgtgccagcgcgaaccgtttggcttccggctgtacaagcaggtggtcggcaagtccgctggctaccagcatgggcaggcttttttcttcatcgtgagaatgcaggtattccagtccgcgcaatgagacattgccctgcatgcttcctccgttccgggtgatgaatttttgtaccaagctgttatccttgtcaaagagccggatatccgggtagcttactcctgccggaaactggtagcggcacagataaagatccggcaagtggctttggacaagggacggcttgtacatttccctttgccgctggaggtattcggtgaatcgttgattcatcatcgatacttctttctccggcatcaggtgcatctccagttgtcggggttgcccttccaagtcctgggtaacaaagaaaatcataatgtttgaaatctcttgcttttgcatacgattgaaatttaaaatagttacatggtgatacttctactctttttcttttcctgtttgggcggttcatagccccgtaccgcatagtccgtctgtaggattctctttgccgtatccttgatggtccgttcaagtgcatttttcagcagtgtgccatcctgcttccccacataagacagcctgatccgttcatccagggagacaaagctgttttgatggttgaaccggctgtctttttccaaattcccgatttgcccggtcttgcagatccggtcgagtacgcctatgttataattcttctggctcttgcccagattcaacttttcggccagttggttataacattccaaagagggagccatgctgcattctaccgccggggtatagttggctatcatatttgaatccaggaaatgagccttttggggaaggtatatcttttttaagccatgttcaaacatgttcgaacactttgacgcctctttgatcagattgatattggaagtgctgaaataatatatttgcagtttatccgcatccctgtaaaccggcgagaagaaattatcgccaatatgctgcaggtatttctgcgcacactgtatccccctgccggtatcattgaacatcaggactccctggttcgtatttattgcagtaatcaccctgttgtagatatctttttccttttcttgatggaatgcgcggtaagcgttcagttgttttttcagcaggggattgtctttggccttttgaagcattctctggatgctatccacattatggatgccataaggagatgtattctcgtaaacgaaggcgatatcccgcaatgggaaatgagttgcacaagacagtcctccgttatgggtcatgtccttgatgaacctttcaatgttccccggttgtacagcaccctgatatggtattaaatagacttcttccttaggaatgtaggagcctttcaaggccagttctgcctgcccgaaaagaaatttgccgccatctgaattgatgccataacgattctctatggtctggaaatgttcaatctgcctgttgctgttcaaattgaaaccaatgtatgtactcatattattttatggtttagatgaatggttgattaagatagtctatgccgtttcgacgggtcgggaacttttttattcttcattttctgctccattttctgtttttcttccaggtctatagtccatggaaaacaggtcatgatcttgtccgggcagcaaagggagattcttttttgtttcatggactcatcatccagccggatatagacaaagtaatccagttccccttttccggtttcttcaatggctgttactgttcctttatagggaacaacgggagtttcctcttccggatcgttctctacaatccgcgctccgaggtacatctgacttttaggtatcatatcgctttattttaaacggttattgttatgtctgttcttattctcagtctttttaacggtattcttctcttccggcagcggacagagcagtccgtcctttatcacgtatgtcctgacgccgaagggcttggaggaaccctcaattctgccctgctcaaagtcggccttgcaaaaaaggagatgccttgtcgcctccttgttgttttccgggagatacagtgcgtatcccgaagccagtgccgtcttttgaacttcattcagttttcggcttccgacggtgaaggtaacggtggagtcattcaacatattctcaagggaacggtgccctctcacatcgaaatcccttttcaaaattccatcggcagccttccggatttccgtagacaaccgcttgaactttcccgtatcgaattcgccggcagatttaacctgcgtgactttttcaaattccttggcatacggcagcagttcattgaaataggtaaacggttgttcatgaatattcatataaccgttacgcatgacggtcagcagccggtaaatgtcatggttctcccggctgatggaaacctgcgtatccttattgaaatgccagtcggtggcgaattttataaaatccccggctgtcgcttccatcgaatggtagcataccggttttaaactgtcgatgaattctttgggcagttcgtcaagaccgatataggatgccggataaaaatcgaaggaataatccagttccatcggtttgcacggcttgtaagcggcatctatgagaggaaccaggttcttgtccatgaacgtactgtcgtagacggccagatggccggtatcgtagtgcgggtcgaagtaatggtccgtgatgtaccggatgcactccctgaatccgttcctgccgatctcgttaccggaaaagataaggtatccgaagtcattctccaccacttttaaggggaatgtgtaccgcggctggcaccggtacaatgtccttttttcctgttgctgtaatcgaaactccaagtatgcgggttcctgcatgagatacttcttcaatatgccgccgtccggttcattcttgtatttataggtatagaccgcatcacgcagggaaatgcgtttggcagggggaatgcagtgttcttgaaaatacggcagcagttccttgctgatatattcctcgaaaggggtatgggtatctaccggtggaacctgcctcatgttcgccaggtcaaaccggagcagttccgtatccggaatataggggcagcactccgcttccttgatattgtcaatcaggaatttgcggaacaggctgtccgcatctcctttctgaatgaatgtgagggcatttcggggctggtggggagagtactgatggtaacggtccataccgacaaaaatacttcccggcttgtcgggatcgaaaaaaggattttccatttggtttctcttgtccatatttctacaatttagggtgggtatttcttttctttttcacgtcctgctttttattcaaagccttttcgatgactgttttcactttgaacacctgtttgttcgcaggaggatccttagaaaatacgatccgggtgaaatccccgtttatccatgcataggcatgggacgggttgctttttgcctctcccggcaggaagagtccgtgccctgccgccaatacttgccggtgaggggtaaagagccggacaccgtctacggtgacacattccatcgggtcgcggaggatgttcccaacagtccggtgtccacgcacatcgtaatactgcttgaggagtttgtccagcaaggctttatcctggccggtttcttctatctgctgccggatatccgatgctgtaccttgtttggaaagctccagtaatttacggtccttgctttctatttcctccaaaatatcagcgatattacggttgcgatggctgctggtacaatgcatattgtggcagaaactaccgaaatcctcccaggtcggcttcatctcattccggtagaccagctccatttccggtgtcttatccatctgcaggtaagcatattccgggtacaggccttcacccggattgacataggatccatcctttaggactccttctgcccggtaaacatttaccggaccaagattgaaatggggatcgaagtaatggtctgccataaattgcagaaagtcctgcctgtttttctgtccttccgtcgtatcagtaaagaacacaaagccatgggctgtctctatggctgtataggattgttcaggttgcttcatatcattacattttgagggaattgttccttttcgttttcgatacctttttcaaagccggtacatatggaatgattttgccgtttttctcctgatacacggtcttgtttacgggagatttggtatatgccattacccggttgcatgtcttttcggcatggaggaaatgtaaatctggcattgacttggatatttggggacagtagatccactttccttccagcaaggcttgcctcatggcttcgccggcatcggttccattgatgagaaacgggacgctcctgtcattcagtgtcctttccaatgtacggtgtccacggacatcgaaatccgtcagaaggatattcttcgctttccaacgcatgtcatccagcacatctgacaaatctggccccgaggactgtccgttgatacagtcgtctatccgggtgacatactcctgaaagacattccggtatccgaaatcgggatcatttattatatcccgcttgaatccgttctccatcagatacaacagtttgctgatatccgcattgttacggctcgcaggacatccggcaaattcattcaggcggagaaattcagaagcgctcggctccatgtccgtttcaaacgccagtttccactgtttcctgtcacggaaagcctcttttgagaatacagcattatcaaaatcatattccccttttccgctttggggattcttccggtagcaggcatccaccaaaggacagatatcgtcggacaggcagttgacgttgtattgcctgacaggaccgggttcgccatgaacccagaaataattgccggataactgttggtaaaagctcttcaatccctcccgtcccattttggtatcactgaaaaacaagattcctttggacgtttccacagcatgcagcggtaatttgtaaaccggattataatcatacctggcagccagctcatcctgcttctgatgaaaatggaccagctcgtccaactgctgtgtggtcagtttcggaagttctcccgatatcatgaggatatcgctgcgtgactgcgcaaacaggacatttctcagattggtacttattagaggagccagtcccttttcccggatatagggtagtaatacctgattgatatattcctttttggaaatatctccggagatagccggtacatccgtcatcttcgggaatgaatagatttccagacgggtattcggtacgaaggcggagtatttggcttttatcgattgttggctgaacaaggccataaacgtatagacagggtcttgcctgtcgggattggcaggataaagcatataggaggattctgcatggggtttctccttgccggtttcataaccgacaaggagctggccttcaccgtctttcctgaaaagctcgtccaatagtttgggatcatcagaaatataggttgccatttttcttacattttaggtgtgatggacggtttacgggtacgcggtttcttttccgcttgctgtgaggcttcctcttttttccggggttttccggctacttgtaccggtgcatggggctgctgctggcttccgtcttgttcctgaccttgtttctgtgcctcttccaacttcttggtgcttctttcccagaggaattccacccctcgctcggcggcactcatctggatggaggtggcataaaattttccattatcagacttgaaacggatcggtacttcctcaccgcgcacggcagcatcgtattctttcggagaaagcgtataatctttcaccttacgcggaatgcgtgcctgctctacgggcatatggaacaattcattggtcaccgggtctttggaaaggtagcaggatttggtttctttggtacggtagtcaatgactacatccaccgccttgccgagattgccggtctggttcagggccttgaggtcttcttccgtcaggacatgtcccctgtagtcttccccgatcttgggagcctgacggatgtagtggatgtcgaacttgacagctccgttctcgtcgcggaacagggagagtttggcatccccgttttcacgccccagctcggaattttttgccacacggaaagcgatagcggaagtctttccctgcaacattctttcgaggctgtcctttgcgttcttcagtccgtccggggtaatgccgtatttggcggcctgttcccaattcacttcccgctcgttgaagcgatggttattatacaccctggtcgaagccagttcccttctgactgcttcgttctgtggttcctgcgccgcttcgatcttttctttggcctgctctacgagcgtttccttcggcatgttgtagagggagtaacgaccgggattattgtactggtagagaaaattcttcccgaagttggtgaagaagtttccacgttggtccactttgataaactggtccctgttcgcctcgttagcttcgagcgtttccagctctccgttcgctgcgattccttttacacctttggctttctgctctttcttgtcatacgccatcaaatacccgtgttccggggttgcttccttgttttcaggagctaaattcacatcgttcatatacgttaattttaaagattaatgaatcatttacgagggtaaaattactatctttgtcattaaatagtttgattatgaggaagttgtcattaattgtcatgttctgtcacttattgtcatgtccggcttttgcacagtccccgtcaaagggatataaagccggactcagtgctgtcatctaccgtatccactctgcccggcagtgaaagtctttcatatgagacagccggttgccggttaccgtactggccgattatcctattctgtatccattgaatgaaagtcggaggaggtatgccgtttcttccggtttcggtataaggatgcatccggtgaaaaagaaaaggatactccatgccggagtggatcttgccgcaccctatggcacgccggtctatgcttcaggaagcgggaaagtcgttgaagccaggtatagcagcagttacggctggtacatcgaaatccggcacgcgggcggcttttccacgttgtatgcacacttgagcaaattgcatgtgaggaaagggagcgatgtacgcataggtcggcatatcggcaatgtcggtcataccggcatagcgaccggcaaccatctgcattttgaactgagaaaaaacgggaagccgcagaatccgttgcagtgggtgatactaaaggattcccgttctaaaaagagtcattaatttaatccgttacacaatgaacattgaagaagccaagagcattcagttggaggattatctccggcgtatggggttcaacccggtaaaacaacaaggggacagtatctggtattgttcccctttccgtgaggagaagacaccttctttcaaggtgagcgcatcccgcaacctatgatacgatttcggcatcggacagggaggggacatcatcaccctggcgatggagcttcaaaagacgaaggatatctcttatgcgcttaaaacgatagagggacattttccggctgctttccgtccggtagcagcctctccccggcaggcggaaccgcaggctaccggctaccggcaggtacgcattgatccgctgacgaacccggtcttgctgggatatctcaaagaaagaggcatcttgcctgaaatcgcaagggaagcatgcaaggaagtgcattttcagaacaagggaaaatggtattttgccgtaggctttgccaaccggagcggcgggtacgagatccgtaacaaatacctaaaaggcagcatatcgcccaaagagattacccatatcaaaaatggcagcgaccgttgcatagtggttgaaggctttatggattatctctcatacctcacgctcaaggctacgcatcccggtaacggacagcctaaaggaaacggtccggactatatcgttttaaattcggtcagcaatgtaggcaaggctatccctgtcttgaaagagtataagagtgccctctgcctactggataacgattccgccggaaggcaggcttttcagcagatggcgcaagccggatgcccggtcagggacaagtccgactgctaccgggagtataacgatttgaacgattacctgttgggcaggaagatggcgcaggagaacaagacggatcatcagcacgaaacagccccgaagctgattgaaaagcctgcaaagaaacagtccggttgaaaattataaaatactggtccttgtctgatgcatgaaaggcaggcaataaaaaagagagtcaaatccctgctggagggaatttggctctctttttattgctacccggctaccaccggatatttattcttaataatttctgatcagcaattcattgaccgcttctcttttctcggctatggaacagatggaacggaagatgctgattcgctggatatggaaaccggcatagaggtcgtcgaagaaggtgttctcagggttcttttgccggggatcggagttggaaagcattcatttggcaccggtttcacctattcccttgcagaaatttgccaggttgatctgctcttcatctccgaagtcctgtggcatgtaggaggtgcaggagttaccctcattgaccggcttataaggcgggtcaaaataaaatagggagttggctccggtgtattctgcggtctgccggtagtcaccgtccagaatcacaacatcttgcagcagcttgtggttaaagcggatcagttcctcttccaacagttttacccgtcccccggcaccaaaagtgacggacagctttccgctatggttcacggagtagatgccgttataacaggtacgcatgaagaagataaacagggcggcacgggtgatgttattcgggtttccttcattgtagtaggtacgtttctccatgaagtagacccttcttcgggtatgttcctccagcgcgatgtattcgtcctgtatccgggcaagcactttaataagctgctccggggattccttgatgacgcggtagacattgatcagagcctcgttggagtcgttgatgacgcaacggatttccggataggcttgtcttattcagaagaagagggcgccgccaccgacaaacggttctacataggtatccatctgtccgaagtctttcggaagggattcgataagtacgggaagcagtcttcttttacctcccacccaggggaagcagggttttcccggcaggttggccggagaacttttctttttttccatgtttacaacatttaaatgattaataaattaaatagggattattcatcgtctgccgtttccagcaggtgtttcaagttgggatcattttggatgcgaagcagctctttttcgatgatttgcgtcacgtcttccttgatttgatagtagttcctttcgatttcctcttgcatgtggtccttaccatccgcaccggtaaagtcggttatgacggggataggcttgtaggcttttgtttcggcggctacccgttcattgtccaccacgatctcgcaatggaatatcttctgttctatcttctccccgaagttgtcgcagacactgccgacaaactctccttgcgagaggttggagattttggaggcaggtatcagcgagtcgagctgggtactgatattggttgaggtgtcttcacgggtcatattaatggatttgcgctgttggagcactttcccaaacctttcagaaaggtttttcgctgtttctccgaccacttgcccggaaaagatatttccaattgtgttctggatcacccgcgcctccttatcaccgtagtcacgtattaactggctgaaatcctgtgctcccagacatactgccactttgttgctacgggcggtagcgatcagggtgtcaagtcctttaaagtaaagtgtgggaacctcatccactagaatagagcatttgagcctgccttttcggttgaccattttaacgatacgggcattatacaatcctaacgcacatgagtaaatattctgtctgtcagggttattgccgacgcacaaaactttgggttcctccggattattgatatccagcgtgaagtcatctccggtcataatccaatataaggcaggtgagatcagccttgatagcggaattttggcggaagctatctgcccttggagctgctccatcgcaccacctttccatgcatccataaaaggtgacaggtaattctccagctcccggtaagaggtcagtatggtgaacaggtcggaatacggtttattcaatagctctatggcatgtgggaaggtgcagaatttcccgttttcatagattttaagataccagatcaccgccgcaaatagcacaatcgggctttctacaaagaaatctccctgcttttgaatccaactcttgttcaaatttaacatgattacatacgctgattcgtatgcatccgcgatatcggatagaaacgaaggattgaggggattgcaccggtggctgtatctgggatcatcgaaattaatcacataaaatccgaccggcttggcatacttatccttgtttttaagcagctggttataagcaattatgcttaaatccggatacttaaaatcatagatataggcggcgaatcctttctctatctgctggcggatatagttattgatgatggcataactctttcctgatcccggcgtgcctaatatcaatgaggcgcggaagggattaatcacgtttatccagcctgaataggtctttcgttggtaacggaaacgggtgggcaggtttaccgagtattcattggcaatcaacctgcgctcctgcatgaagctctcgttctcgtcgttaaagacgtcatccatgagttggttcttcaacaggcggctgatccaggttccggcggtaagcaggctgatatatccggcagctacggtagctacatataataaggttagaagcgcgacggggaagcgtgccgtcagtaagagctcgctaccaaaaaagagcagcatcccggctataaggtaacagccgatactccttcatgacatctccacgtccttccgtcctttcgctcccatgcaggagaagaaaaggaagagcagactgaaggacttgctcaccagcgaatgggaaaacagcccggtatcccgctggaaattgagcagtatcttgtccacgacaccgatgttcaggttcatggaaagaaaatagggatagcagaaataatagacattcatcactaaaaataggatgctgatggccctcatgaagtcaaggttcttattgagccctctggtttcgtcttgtgacataagcggtatgataattaatggtgatacattttattagcccagatgcggacctctgcgttttctctttttctttttcccgtaagggctttgcgtcaggtcgtctgccggatacggataggattccaaagagaatatatcaagcagtccttccaccagctccgtctctttcatttccggttcggacggatggataacaggggcttcttcagtcttttccggtgggatcgtgccgtacttccggtttataaccgatgccgaatattctttgcccagaagcgagcccttgaatacggtctttgagttatggtcgatgtaggtcacgccatagatcacaccggaatcgttctgccagagtatggcggcaatgccttttccagaaagttcctgcaggaatccctgacgggtgggctgtccttgcagggcggtagcgatagcttccttcgtctgtacgggtacgggatgtcgggcaattcattgtttgcttttcacaaatttcttttggagtgcctcgtagcctacgcttttaccgatcttgctggatttgatggctacgccggtccgttctcctttttcatcggtagccgcatagaccagtccatgataggtctttccctttatcgtcttgtgggcctcttccaccgttacatggaaaaggccaagcagggctttaaactccttgacggattggaacttgtatccctgcatgacgggcttgaccacattggctatctgatgcttgatatcccccttccggtaatcgacggcagtcagcggcagggattcccgtcgctccatcttctcggcgggtaacagatggtatttcctctccagctcccggcaaacagcggtcgagcgttgccattctttgtaatctttaattttctttccctgctcgtcaatacgcagggagacgatatggatgtggggcctgccgatatcctcatgccggtagatgatatagggttggttgccatatcccattttttccatgtattcctggccgatagcggtcaactgttcatcggtcagcacatcgtccgggtgtggatttaatgaaatgtggataacgggcttctcagtccggcggttagccgccagatacggttcgaaggaacggatgcagtgctggatggtcggatggccgtctgccggttccatgatccggtttcatgccagtggccgtgcctgctgcttgtccactttttcttgattgtagtataatgccccgtaaacggaggctcctgatgttatttttgcaaccattgttcaaattcttgggtgagacggataatctcccggttgagagatattagttcaatagtcagttgctccaatttatagagcatggcaagagccttcttttcggatagtccggtatgcagagctttgactgcctggttatagtttactccgatccggcggtattcgctctgcaggttggtcagcttgatgtagtagtccgttgccgccttatctattttcacgactttcatcggtttgtcgaaaagggcggcaaggatgaactgggatttattattagctcccgaattctcaaagagcctctcaaactcgatgttctggagttcgtccagacggaatccgtaataataagaatgaagttctgattcctctttgggattccgtccgcctcttcatttgctcgaagtgtcagcccgtccgggtttgcgtgtactattgattttagccatatcttttcaggttttatttatccggcagcaaaataagtgataattttgatacgaacctaaaatcggaaagtgactacaaatgacaagagatgactatttgtgacagggggtaaaaatacccctgttcacttcccgtttccgcaagccgcgatgttcttttcaaaggtttcctttagtttgggcagcaggacggaatagttctttttgcgccgggcaaggtcggcacgcaggtcatatggtttgggaatggcaacattgaagagtttctcaaaagcggaaacgataccggcgaaagagaggcgtttgccgctttcgtccgtaatcagcccgctgtaatccagcgaggagatcagttccatcaggttgaccagcgaacctttccaatggagcgatgaaagaaacgaggaaggtgtcgtgatggttccggggtactgtacaccaaaattgaccagctctatttccgcctccaccagcaggaggcatttgtccagatagaattcggctactgccgtgtggaaatgtcctgttcgggtgaataacttctttagggaaatcagttctaccttgctgtgaagcagatggcgcagcctttccgatacggaaaccgattcgatggcgaggtcgtaaaggtattgttcatattcggtataggaggaagagaattcttcatcggaaactgtctgttttgggcttgaagccagagataaataattgaatatacggcattctgtaaatggtttcatacggcatacatttgatttgtttataccggagtaagccaaatgaaatgcctctgctatcgtttaaagctctatacctttttaaaatactgacaatcaacaataaacaaatttcatatagaaacgggtgtaaataaaaagtgtaagccgtccttgacaagaatgttaggacggcttacacttttgtaaacctcatttgcttcgggttatcctccggtcagtcgatgatatggtatttccttagtttctcatacagggtagtccggctgacattgagcaaccgggccgccttggaacggttgtcacccgtcttttcaagggtctggagaagcaacgccttttctttttcttcttccgtccactgcgtttcttcttctttaggaagggagatttcaaggttcaggtctgaaacggaaatccattgctcttggcagatgagtacggctcgacctattacattcttcagttcacggatattccccggccagggatattccagcagtgccgcctctgccagccggtcaaagccacgaaacgatttatgggccttggcgcaagtgagtttcaagaaaaaataagccagaggaaggatgtcttcccggcattctgccagtgtaggaatccgcagagtgaactcattgagccggtggaacaggtcttcccggaagcgtccttctccgatggctttttccagattctcattggtggcggcaaccagccggatatcaaaagagtattctttcgtggaacctaccggcttgcagcgtttctcttgcaaggccctgagcaggagcatctgtgtcttataggaaaggttgcctatctcgtccagaaacaatgtccctccgttaacggcacggaacaatccgaccttgtcgctttccgcaccggtaaaggctcccttctgatgaccgaaaaactcggaggcggcaagctcatcggaaatggccccgcagtcgatagccagatacggcttgttcttccgatggctccgggcatgtatctcggctgcaatgtgctccttcccggtgccggaagccccacggagcagaacggagatgtcggcacaggcaatcatctctatcagacggtacatctcatgggctttagggctttcacctcggtagaactcctgttcgttatcgtttttatccagtatctccgttatcagagccaggagattgtctggctgcacaggcttacacaggtagttgatggctcccagttgcatggttgtcaccgcattctccacctgtccgtagttggtcatgatcagaaaagggatagagtagtacttctcattcatccatttcaggagcgaggtgctatttccgtccggcaggcgcaggtctgccagtattaggtcgaactccttttgcccgatggctttacgggcattcgcaagggttgccacgcattcggttttcatcccttttttcaccagccagttgctgatgctacggctgaacacaatatcatcttcaataatcaggattgttttcataggctttcctcccgtatttttcagcgtatactatcagtttttccactgcccggatgatgtcccgcatttccatggattgtctattggtccactctgtcgcaggttctgtcaccagttcccgtaaatgagacaaggggaaatccagacggacggtttcccataggggcaggttcttatgcaggatggaggcggcggcctccttgtcttgtcggtctaaggcagcggttaatgcggcaaggtctttccggctctcttcgataaacagggcgagcatttcctccctgttgtcctctcctgaaaggatgagtgagaaatcgggagcatactcctttctgtctttttctcctatcacttgtgccactgtatttatcagttcttccatagagaatggtttatggatgcagcccgaaaagccgcccgacagatactcgttgtcatcatccacccgtgccgttaccgctatgacggggattgtctttgcgttctccatattggatgcccggagcagttcaagtattccgtagccgtccgtttcaggcatctgtatatccgtcagcagcaggtcatatctttgtgaccgtagccgggtaaccagttcacggctggtctggcagcagtcgcaccgcactccgttacggttaaacatctctttggtaatgttcagttgcatccggtcgtcatcaatgaccagtacgttgattccatccagatgataatcagtagcgatgcgtgtctcatccatctgggtggattcatccgcctcaaggagtggcaggaatgcggtaaacgtgctgccttcacccggtttgctttttacggtaaggcttccctgcatcccggagaccagcctgcttgcaatggccagccccaatccgaaaccgggaacattacgggcattgtccaaccgttcaaaagctgtgaatatccgggttgtttcttcctccgtcatcccggtaccggtgtcctgtaccgagaaatgcaattctttattccggtattccgcttgcaggcggatttcaccttgccgggtgaatttaatggcgttggaaagcagattgttcaggatttgctggagctgggaacggtcaccgcttactaccacatccagaccggaaaaggcggttgtcagccgcagctttttctttttggccagcgaaccgtagttccgggctgtttcgctgaaaagggtctccagccggaaaatcgaaaggatgggtttgttcctgccggtatccagcaggtagaatccgatcagcgtattgaccagcccgatcatgtaatcggaagaatggagtatattttccgcatactcgtccttgcggctcttcttttcttccccggggagcagttcggcgcatcctttgatagtagccagtggcgcacgaaggtcatgagcgatggtgagcatcatgcgttttctggattgtaggagctccgtgttctcacgattggaggcttccagctgacgctgatactggtttatcctgttcagatcccggtggatgataagatacaggaggacggtcagcaacgagatgaggacagccagcagagagaccgtatggaacgagcggtcgcgtgtggaaatgaattgcctgtaacgctcatcaagccgtattccagcatccgcctcaaagtccctgacaatccggtgtagcctgtggttcaggtccgtgttgttactgtacaggaggtccatctgttccagcagcctttcccgttcggctttctgcatgtcggtcacctccctgtcaagggagtgcagcatgctcgtgacagatgtggtaccctgatgtttaccaatggactgtcgctggcgttccagctgttccttctgctgcagataggccgattttttcctcccgggcctgatgaatgaccagaaacccttcttcggagtttcctcctccttctttttctcggcaggaaggacatccgcctgctggatatgagacacgattgccggaatcttgctgttcacgatctcgccggtcttgcgcagacgcccgaacgtgtccatgaccgtgtctaacaacagttcctttctttccagcagcaggcataacgaatctatgcgcgactgttgttcgggagacttcacataccttttcagtgtctgcaacatgttacagacactgtctttttttgtgtggtagagtccaaggtcgctttcatcccagacgctggctgtttcaccgtaagtggccagtcccagcaagcccgcgtatgtttctccggccagatgccggatacaggccagttcatgctcatcctgtcgcaggctgttccgcctcgtctgttccttgcggaagatatgaatggtcaggacgagcaggagaagcagtatgacatatcctaaaaggattttaagtttcaaccacatggaagtcttcattcttatattggaatcctacaaaaaggcgtgttcgctcatataaaagggaataatagaaacttatgataaaagtttattactgtttcaaaccatttgaggatacctcgcaagtttgctatcacacagttgatcttttaatctttttttatactcacagaaaggataggaacctgctttttatgactgaaacatatcacatcccctttattggacattacattctcattcgatcatattgttttcatttcggctcatccgtttcttcacccgttctactgcttccgatacaatttctttgttttcaaagcgttgtgtataattggtatagtctggatgaatccgtttgtaggtcgggtcaagaaacaaaggactggaaataatatggtccgctgtcgaacggttacaacagaaaactatattttcaactcccgccagccgggtcagtgcctttacatccgtgtcatgtggctgcaatgtcatcggatccgtgaaaaagaacaaataatcaatctctccttccacaatacgtgagcccatttgctggtcaccacctaaaggaccggatttcagaatcgtgatatcccattctgtttcaggatgtttctcttcgagcgcttttttaatgagtgtaccggtggttcccgtacaatagaacttatgccctatcagacgttccgagttccaaagaacccattctatcatgtcctttttcattgcatcgtgtgcaaccagaccgattttacgaacaattgttttcatcataataataaaatatggtttatgtgataatataattaacaatatccaacagctttataaaaaacaggagaatgactgtatgagtttgagcagctccttgttcgcccggctgtccacggtggcttcccgcctctcctcaaacaaagtaagcgttgcggagcattccccgcagatatcaatgccgactacacgttcctttcgaaggacaattgccagtaattcctccagttcctgcaggctgaaagacccttgatcccagtctgttactgcggatgccgggttcaggacatccttgtctatggacaagtaaaccggtccttcaatatacgcagaggagaaattgtgccagcccttctcgtgagctaacgtcgcttcgctataaaaactgactcgttgtccgtattcttccggtacggtgcgtatcagtttgtccgatgcaccgactatcaccactttcttgcaaagcatattccagtctaacatgtcttttacccagctcccacaagaaagcatgcccttgaacaagggaggctgcatgtcggggtgatggtcgaatacaatcagagagaacggaactcgaagtttgtctgtccataatttggtcaggtaatgataattgcccgaatcaatgaaatggataccttccgctggataaccggcaatcacccgcttcaattttcgtatcccctccttgtcacagtaacctctcgttccagaaaggtgacggcagtctagccaaatgaactgattgttccgtgcaaatacctcatgggcatacacaccggtgaagttcatgatgacaaccggccagacggtttctcggtccgccttcttcttacaccgtccatttgtcagtaactcttgcttattcatgtccgttcagaaccatcgtacataacaaaaatcttgccggtgaggtaacaggggatggttgggatacattctgaatgcctgtttgaagcttccagcgctgaacattctggttattgccttgaaagtgtataggtttccgtctttggatgtcaaagaaaaaggaatgacctcatggatgcgatcctcattctcctcatgccgtataatgaccgattccaatccgatcgcgttgtccagccctttctcgtcaatgacgaccgtcatctcgtattccttaccagcctccaccgtggcgtccaatccttttcccgcattcacggaaacgatttccacggcattccatctgctgtcgacagctgccttccagccggcaagcgttttcgcctttgcataattgtccgccgccaaaacatgaaagtgttccgacaacttgttgtaaaatccgtcatagtagtcatccagctgtcttttcatcgtgaagcggggagctatttgcgcaaccgagttcttgatgtacttgacccaggtttccggatagtctttttctttccgttcataatataacggcaggatattatgttccagcaggaaataaattgtttccgcatccagttggttctggtactgttcatcctgataggtggccttgtcggtgatggcccatcccgcctccttgcggtagccttcgtaccaccaaccgtccagcacggagaagttgagtacgccgttcatcagagccttctcaccggaagttccggaagcctccgcaagacgggtgggagtattcatccagatgtcaaccccagaaataagatgccgtgccaggtccatgtcataattctcaaggaagatgattttacccaagaattcaggacggcgggatatctccacaatctgcttgatgagcccttgcccggcagtgtcgtttggatgggcttttcctgcaaagacaaactgtatgggatgttcctgattgttcacaatccgcgccagacgatccaaatcggtaaacaaaagatgagctcttttgtaagttgcaaagcgccttccgaagccgacaagaagagcattcggattaaacttctcgaaaatggagacacccaatgccgggtcaacctggcttttgagccagtcccggccgcatttccacttgatgtaggatatcagtttggttttcaaccttttccgcatgttccatatctcttcatcgggtatattataaacgcctttccatatttcctgattggactggtcgttcatgaaattctcatcgaaattgtccttaaacagctttttccactccgccgtacaccaagtgggaaagtgtacgccattcgtcacatagcccacatggttctcttccgggaaatagcctttccagagaggcgcgaacatctgctgtgaaacggacttgtgcagcttgctgacaccgtttaccgcctggctggttttgcaggcgaataccgacatgcagaaacgttctcccttgttgcccggagtttgccgtccgaggttcatcaactcgtcccacgtaatgcccagcttatcaggatatcctttcatatatttattgaaaagcccctcatcgaaatagtcatggccggcaggcacaggtgtatgcacagtgtaaagcgaggaagccctaaccagttccatggcttgtccgaagtccaggccttcggatatatagtcgcataaccgctggatattgatcagtgcggcatgcccctcgttgcagtgatatacatctttctcgatgcccaatacttttaatgtcatcattcctccgatgccgagcagtatttcctgcttgagccggttttcccagtcaccgccatacaggtgatgggtaatcggacggtcgaactcgctgttcagttcattgtccgtatccagcaggtagagggaaacacgtcccacattggccttccatacattggcatggaccgtgaaactgtcggcatagggaacatggattaccagttgtcgcccgtcaggctgcatcactttctctatcggaagctgcccgaaattctgtgggtcataatgaacctgttgctgcccgtccatcgccagagcctggtcaaaatagccataacgatataaaagccctacagcacagaggtctacgttactgtccgaagcttccttcagatagtcacctgccaatatgcccagaccgccggaatagattttaagaaccctgtccagaccatattccatgctgaaataggcaactgacggacggctgtggtccggctccacatcaagatacgccttaaaagtggaatatacgttttccatcttacgcatgaagtttccgtcatgtgtcagtgcctccagctcttcataatccatccgttccagaaacagtaccggattctgttccgcctcttcccatagttccgggttcaaaccactatataaactcttcgcatcctcgttccaggtccaccaaagattatgtgccatctccgcaaatctccgcaattctgccggaaggtgtgaaccgactgtaatctccctccattgtgggacgtttacatgataacttgaatattccataacattttacttatttgatagttcatgatttttttctgtggaggtttctcctgtttccggttcttcctgtggaaatgtcccggctgtaccctggaaattctcgaggaactgtttttccatacttagcgatcgtttccgtatccgcttggaaaaatagataacgacaatgatcaggaaagataatatcagtcctgaccccaaagcgacattgaaaagacggatgatgatacccattacgataatgatacagatcaacaccttgatcactatcattgataccagcagccccctgttgaacctgttgtccgcccaaagtttgcggaattcgacggaattgtttttcttcatgatgatggcgcacaaaaacggggatatgataaggaggacaagaacgaagctcagcaggcttcctttcatccccggaatacgtcccattaccagaggatacgcataggagaagaacagcgctatgaaaaacaggcataccaccagataaagggtgacggataccaacatggacctgatgagcttgtgccaggagccttgatgtcttgtggtcattgttccagaagaataatgcgtcaggtaatctttcaggaattgtggcaagtgcctgtctgcaaaacagtagacgggatccgacagtcttatcatataaggagtaaggaaagtggtgatgaccgatactgccactatgaccggataaaggtatttgtccattacattcagactgattcctaacgaagcgatgatgaacgcaaactcacccacttgtgccagggaaaagccggcttgtatcgcaatctttagcggttgtccggaaagcaacacgccgaaactcccgaacaggacctgcccgcataggaccagtgccgtcaggataaaaacaggaacggcatattcccatatcatggcagggtcgatcatcattcccactgatacgaagaaaacggaggcgaacaggtcctttaccggttgcacgatatgtgcgatttcttccgctttatctgtttctgccagcagggatcccatgacgaacgcacccagcgcggcggagaatcccgcctttgtcgctatcatcaccattcccaggcatagtcccagggaggttgtcaacagtatttcattgctaataaagcggttcaatcttttcagaagggtaggaatcagatagattcccaatgctgaccagaaaataagaaaggccgcaagtttcaatatgctctccagcatttcgaagccttcaaaatgcttgcctacagccaatgtggagaggaccaccatcatgattaccgccaccacgtcctcaatgattagtatccccaggacaataccggtaaatttctgatcgagaagccccatgtcactgaatgctttgaatacgatggcggtggaggacatggacagcattccgcccagaaagatacagctcgtgtgtgagaagcccatcgcattgcctgccgtatatcccaggaacatcatgccgcagacgatgataacagtggagaatatggccgaggctcccacacttatcagctttctgaacgagaaatccagtcctatggcgaacaggaggaaaataacaccgatatccgcccatatcttgatattggcctggtcggaaacagtcgggaatagggaaatggaaggacctgccataataccggccacaatatatcccactatgaccggctgtcccagccatttgaaaatgacggttatgataccggctataatcaagatagtggcaaggtctgatattaaaggggcaacttccgacataggagtaacattttatatggacaactcgttaaggacacggatcaggtttttgtcaatgggcttgtcgttcttgatagcctggtcaaaaggaacatagacaatctcattgttatgtatgcctaccatgatattgtgctggtcctccatcagggcctgtatggcggcctcacccagccggctggccaatatgcggtcgttggcacttggcgctcctccccgttgtagatgtcccaggatagagaccctgacatcatatccggggtattccctttttacccggtcggcatagtgcatggctccgccattcttattgcccgggctttccgtcacgatgacgatgctgctgttcttggtcttccggaatccgcgtccgataaaagtctccagctgatccgcatccgtccggtcttccggaataatggcggcctcggctcccgaggctattgcgctgttctgggcgaggaaaccggcgtcgcgtcccatcacctcgacaaagaaaattcggtcgtgcgaggtggctgtatcccggattttgtccacacactccacaatggtgttcagggccgtatcatatccgattgtaaaatcggtaccgtacaggtcattgtcgatggtaccgggcagtcctatgcacgtgacagggtattcctcggcaaatatgcgggctccagtcagtgagccgtcgcccccgatgactaccagcgccccgattttttctttcctcatggtatcgtatgcctctctgcgtccttccggggtggtgaacgcttcggaacgtgccgttttcaggatggttcccccacgctggatgatgctgctcacatcctcggtcgtaagttccctggactcgcccgctatcaggccttcgtaccctctgtaaattcctttgactttgaagccgttgaaaatggcggtacgggtcacggcacggattgccgcattcattccggaagcgtcccctccggaagtaaggattcctatatattcatcttttttcatctatctcagttcttgttttgtttcattctgccaatatagctttcagttttttccggcagtgaaaaatacggctctttatggttcccaaactcacaccggttctttccgctatctcacggtatttgaaccctgacaggtacatctcaaaaggtatgaaatgcgactccggtatacttttgatggcattacgtatcttttccaggtcatagttcctgtccacctcctctgtacgggactcgtccatgatccgcgaataatatgcaggatcggaggatatgtacagacgggtatgaccgacctccgcccggtaaccgttgataaacgtgttacgcatgatgataaacagccaccctttgaaatttgtgttcttgttgtaactttctttgtgaagcattgccttgagcagggtatcctgcagcagatcttccgccttctccctgtccgctgtcagtttgtacgcgaaacggaacagttcgtcctgtacgctaagcagctctttttcaaaattgaattccttcatcggttgtgccggttccctgttccggaagtgcctgttaaaggccggacggctctccggacaggaaaagcctgtccggccttacaccattccagatatggaattatttaacctcgatagccttggaagttttttgtttttcttcctccttcactttcgggatttcaatggacaggatcccgtgttcgacttttgcggaaatcttatccttctccacgttttcaggtagcaggatggtctgctggaacttggaataagagaattcgcggcggagatacttcttgtctttcttctcctccttcttctcttctttcttttccatgcagattgtcaggttgttgttttcgtcaacattcaccttgaaatcatccttcgtcattccgggagccgccatttcaaccttgtagtccttgtcattctcaatgacattgatggcaggagccgtaactcccgtttttgccagccactcattctcgaagaaatcgttaaaaatactcggcaaccagtttgaatttgtttttacaggtaccatttttacctccttttttaaattgttagtaaataaaatattcaaaaagacaatacaaatcagtctgattgactgactcttatcgtctgatcataccttgttcggctacagcctccgtccgtctccgtatctcctcctggtctccgaggaaatagtccctgacaagcaccggccgttcatcaaattcgaatacataaggtactgccgtgggcaggttcaagagggatatgtccgtatcggaaatattcttgagatgcttgactatcccgcgcagactgtttccatgggcaacgacaagcaggttgtccctatgcatcaatgtgggtaggatgacacattcccaatagggcatgacacgcatgacggcatccttcagggattcagtccgtggcagttccatttcgggaacaccggcgtaacgggtgtcgttccccggatagcggggatcgtcttccttcaccggctcgggcgacacgccgtaacttctccgccagatatggacttgttcctcgccatatttgtctgctgtctcccttttgttaagtccctgaagtatgccgtagtgtttctcgttcaacctccagcttttctccaccgggatccagtcttcattgagacggtccagaacacaattcaacgttttcacagcccgtttcagataggatgtgtaagccgcctcaaaagagaatcccgcttctttcagcatatcaccggctttacaggcttctgcgatccccttatcactcaggtctacatcggtccaaccggtaaagcggttttccttgttccataggctctcgccatgtctcaacaatacgatccttttcatgccatatagtttttatgcaacggttatcgaaggatccagatagacatcctgaatggtgttcagaagcgagaccccgtctttcatcgtcttctggaaggcttttctcccacagataagtcccatacctccggcacgtttgttcaccactgcggttacgacggcatcatgcaggtcagatgtcccatgggactcgccccccgaattgatcaggccaacccttcccatatacccgttggccacctggtagcggcagaggtctatcggatggtcggagaccagttccgtatacatacgcccgtcggtcttaccgaatccgatggctttaaaacctccattgttggacggcagcttctgcttcacgatatcagccttgatggtgaccccgatatggttggcctgccctgtcagatctgctgccgcatgatagtcaatcccgtctttcttaaaactgctgtttctcagataacaccacaataccgtggccatccccaactcatgggcatattcaaacgcctgtgagacctccacaatctggcggcggctttgttccgaaccgaaatagatagttgcccccacggcaacggcacccatgttccatgcctccttcactgtaccgaacatgacctggtcataactgttcggataagtcagcagctcgttatggttcaacttcacgatgaaaggaatcttatgggcgtacttacgtgccacagctcccagaactccgaatgtggatgccacggcgttgcatcctccctcgatagcgagtttcacaatgttcccgggatcgaagtaaagaggattgggtgcaaaggatgctccggcagaatgttctatcccctgatccaccggcaggatggagacatacccggtattggccagacgcccgtgcccgtacagggcttgcaggctctccaaggtgcgtatattcctgtcggaatccacccatgccttgtctatcatattcggctcggggatatggatgagtttcttgtctattgtcttgcatacatggtccaggtagtatcctgcctgcgttcccaacaaatcaataatcgtgctcatgtcagtcgtttttttattccaaatcaggactggcgttcccccagttttgcatccatgaaaaggatgccgctctctccggctttcttcatcaggtttacgatgttcaggaaattcgcctcttcctccacctgctccctgacaaatccccaaagaaaatcacgggtggcattgtctttctcctcggaagccagatgtaccagttcgtcaatcaatctggaaacatgtctctcgtgttccaaggcatgttcaaagacttcggtgggactgccccaaccctgtggaaccacatcgaccttgtccacttttgcctccgcctcacgtttggccatatattcggcgatggcacatgcgtgtcctgtctcttccgccgattgcttgcgcatccagcgggccatgccggaaaaaccttccttttccagatagaaggacattgaaagatacaggttggcggaccataattccgcagtaatctgcccgttcagggccttttgtaaattctcggtcataatgaatctaatttttaatgttggtactattttttatttttcatattcaggggcaagcgtgtgcttgtctcaaaatatctgtcaggacaggttgcatcccgtttatgaaacattccacggcgatgaccatcagaataagccccatcagtctcatcatcacattatttccggtttctccaagaattttcaaaagccgcgttgacacgcaaaggataatgaaagagaggagacagactagggcgatcacgcaaaccagtgcaattttgaaaatatgctcaggggcatcttccatcagtgttatgccgcttgaaattacacccggaccgcacagcatcggaacggcaagaggcgtgacggtgatgttcctggaatattcttttttctcgttctcgttcagtttcacatgggtgaagtgtgcctgcagcatgtcatatccgattttaaagatgatgatacctcccgcaatccggaaaccattggtcgagatcccgaaaaaatggaacaggaacctgccgcacaaggtgaaaagtaccagtatgacgaacgtgagggcgcaggattttaaggcgatgctccggcgttctccggcactcatgccctcggtcatctgcaggaaaaccggcatcactccgagggggtccatcaatgtgaacaacgaagtgaaacacaacattgagtatgcgaatatatccataggatgatacttgttttatttttagaccattattttctctgtgaacaataaactccggtcaggttacacgatttgacacatcatatgaagcagggcagcctgcgttcatattccatggccaggatacgcaacaattccataaacgccgtacttacatatatccgttttgtgtacagccccttgatgaaagaatggatggatgaatccgtattctggcatagtacgtgaagttcggatatctgacgggatatatattgttcatgttcaagcagggtgttcaaggcagccagcggtgtcggccattgccggatgtcgcgcctgatttcatggatggttacagcacctccttcatgatagatgcggttcatcatctgatagaccttgcccatattgtcctgtgcctgtgcacttagccatgaggccaatatcggaagttgctgcccctcaaaatagacctgcaatgacaggtacaggttagttgaccagatttctgtattgatcaatgtgttcatcgcatattcaattcgtttatccatggctgttctgatatttgaaattagacaaaataaatcgtaattcatatcctgcaataatcatgaatttatgtgatagcatctgtaaatcggactcttatggagttgtaaaatgaattttaatgcttgcgagacaaatagtcataaaaatgtataattatcatgcctttttgtcacaagatccctacaacattctcaacaagatatccagttctttctctatcatgttgatcttgtcgtatatgtaatccagcgtattatgatagtgcaggcaggccctgcattcctgcaattcccttgacagggagagtatttgttgccaaagttcctcttctgtatgtccagggggattattgaatgccataaatggattcagagaaactgtttggcatgtaatttgtgtaataatagccgcaagtcccgaaaaggggcaggaatggaaacaaaaaggcagagaattccactaaagacagtaacagacagaggaatgaaaacggaaggcaggacctgtccggttttgaaacaaattgctttcataatgcgattatatgacaactctgttccctgaagttgtgtttatataaagttaagcgtgggaactttggtattaccgttcagaagtatccccatactcaacaacatataatacacaaagccccacgcctatatatgctaacaagatataatagtgcatagggacacctgatgtattatccaattgttgtcttgaaattggggatttcctgaacatggataatgcctaacgcttactgttattaatcttttttggtaaaagacaaggcaaaaatactaaaagaattgattcgcgtcaataaaaatccaacttttttattattttactctctgcgccactgaatttcatcgctctccgctctccaaatcccgtgcccttcagcgataagtaatcctgagttcatcaattgcctcataaaagagcttttgtacatcctaaaatccgcaacctgtaatatttttgatatctggggttgcagatacctctctaaaacgactcgttttcgtaaagaaccctaatggtgcagtcgcaagagacaaaatccccttaccccatgatgcgacttgaggcaatacgcaaaaggccacgaagatttgaggctacccaaaatcaaatttgaaggccatcatgtatgcatcattgcttgtgtatatgttcagtatgtgctgtcttgcagtcttaatccattttgcagggacagaaacatacttgaatacaaaagttttgattctgcttgtgcgtttaagtccaaagctcttcatgtttgcgtcagatatgaggtgtctgtaaaagtttcgtattaaagcggtcagaagcaggaacaccgtgttttccgccatgaacgattttggcagccgtttccagccaaagccgttgttcatgtcgtccaatacacgctcagcaccgccacgcttgttgtaatactccacgatgtcacggtctgtcgaagtatagtcatttgtcagtatgcatctgtatgtatattccccttcccacaggtcgagttccttgttgatgcttctttgccgctgtatgacaaggcggtacgctttgccgacccatttctctgcaatgatggagcatatctcaaactcgtgaccgtttatgtattcggtcttccatccgcgcaaggcaaagatatcgtcatacaacgatacacacctgtttgcgcggatataaaaatgccgactgtgcttctccaccatttccaccatagcctcagagcatgagccacaatccatcctcgcacggtttatatgtattctggcattctccaaacgctcaaaaatacgttttagagtgtcttcctgatggaaacggacattggtattgccgtcgcggttctctatcccgacgatgacatcgccgaccgttgctattcctggactgtaaccggtaaacttcttgtaggttatttttgcgtcaaatttctccgtctcaatgaactggtggtcaaaatcaaagtcatattcattgtctggcagcaactgtccagttgccagcaatgcattgacaagcagattgttaaggtcggaagccacgttgaagtcgtagcttttgcccgaatcagacctgtaggtcagattcggtgtggtcaattcacgaatggccctaagtattgtgtctgcgctgcatgtacggaggggtggatgcaagcaaagtgcttccataaggtgtgaggtcacgtcttcgacacatgaccctccacagaaatatacgcacatcagagaacgtattatctcgctatattgatagccatacactttgctacgcaaacctaaagtagagtctattgtacaagacaacatcctgtcgaatttctccataattggaaatataccaccaaaagatgtgagtttctcggattttatttgtacttttaccatgcttgatgaggttttgtttgactatttttgcaacactaagttaagtgaatcctttgacatgacaaaatcctgagccgctcggctttgccgcttggcttgtccaagaactttttgttgttcaggatattataaaagttaaaatttatagtgttgcggaattaaggtaataacaatactatgaaatcgttattcatattacaacttgtatgttgcgtcattacagccatgctagcattgcaattagccatggcaagtttgcaggtgagatggaaggtgtggcgctacgaaatatcaagatggattctcgttgcatccatgctattcttctccgtccactacctcttacagatgattcatggactccgtgcacaaggtgccgatgtgggcgcagcattcaacatattgttctatactccagtggcatttgccatcactctctccataatcaacatagagagcacaggcaacaaagtgcgacggtattgtttacgtggtatgatggcatacatactcatcgccatagttttcgtcattggcatgttcaaaagtcaaagtttacacattggcaatatgctctatgtgatgctcggtctttttgtggctagcatggcatattttattcttatcattcgcaaagaaacaaaagcccgaaagcagaagctcatggagaatttcggaatcgacttgattccatacgtgcgctattcgcaagccagcatcattttgctatactttgctgctggactccttcctgtagcaatcctcttcaataccttattatatataataggtcccttgatattactctctgtcatctttttcgtccacactttcattgctatgggctattacaccacacccaaagaagtcattcctaaggaaaatgacgcagaagcaaaagtcacggaagcagaagacatgaaagacggcaagaacactcatggcacaaatatcttgacagctaatagaaagatggaaatagaattagccctcaagaaatggtgtgaagagggattttataaggactatgaagttaacatctattcgctagctaccaagttgggatacaagaaaaacgaactgacagaatacttcaatcagtcagaatacaccaattttagaacctggcttagcgacattcgttttaatgaggctgttcgcatgatgaaagccaaccccgaatatagcattgacgctatttccacagagtgcggtttctcatcccacacatggatttatcgtatattcaaacaaaaaacgggcatgtcacctagccaatggcgcaaacagtttgcctccatctaaatgcgtatttttgtaatttcgcattaaatagcatttaaaagaggtgtgtcagcgttttgacacaacctctacttaaaagatttaatttacaatagtattgcggaattaaggtacatgaaaccgataacctgtcatagtggcattgggaaaagccgttcagacgatccgcatcatggtcggcaaaagatctaaagtgacctctttggctgtcttgcgcttggagacatgaatcatttcaagcacctttatgacgtcttcagacttcgtgccacgtatcatggtcacaagtgtacctctgccaccacgtcccgcacgattagtgacaacagtatataattctccgcagcttaaagaagtctcgtcaatacaaaggctagggacctgaggttgtgcccgcattctgacacatttacatttgtagtattaaatatcccaataaaaatataagtgtatattgtaatgggatcttaatagaggattaaaaaataaatacttaatgggctgtttcttatgaattctactgaaatcttataataattgctcaaaaaatcacattctttgtatacgtaatatcctaattttggaacgcaaattaaaagaatattaataaactaaattatctgatttatatgacaaaattaagatgtatgctttgttgcctgatgatctgtactattactattgatgctaggactgttaatgatatatataaaagaatatctgcacaagtctccttgaaggttcccggtaatcaatcacgaaactattcccttgcttttcaaggagccgttgatgataagggaatctatctgttagagtctgaagaaaaaataccattaatcattacagagagaatagaacgtgacaatgttaaatgtgtaatggtagtaagtattacggcattggaagacgtgtactttaattatcaacaacagttgaaaacaggcttccgacataatgactgtatgttttatctaccaggattctggtatagtcgcaatttacgttctcctaaaggtgctccttcatttcatatatcagagagttggctggtacgtgaggatcgtctgagctcaccccttaccggtatcttcaatcagaaagatggacgttatatgactgtggcacgcaaggacgattttcaatgggatgcccttgctacccaccaaacaggcgaaatcatcctctcgggcaaaacgtccctagggttcaccggctttgagagccatgacggaacatcaacactatcttttggatttccttaccgagaagctcctaaaacctatattcgtaagttgacgctggctccggaggttacatctttccaatatctaaaaaaaggagaaacagtactcctgacctgggaatttatcgaggggcaggctacagactactcagattttatttgccatacttgggaatattgttatgatacataccgtccccaacctgtgaaaatacctttttctccagaagagataaaaggagtgctgagcaattattttgtggaaagttttgttggggacaaagctcttgcctattactccagccctgaaatgaaagtggcagcctgtgccaacatgaatgtagcagagataggttttgtcggtcgcgtacttctaaacgctttcaatgcatgggagtttggcaatgagaatggacgtgatgaccttgcagctagcagtaaaaagatatttgatagttacttagaaaatggctttacggaaaccggttatttgcgtgaatgggtaaatctggaaaatgatagtgatgtgaaagaagaacgcccagtgcatagcatacgtcgtcagtcggaaggaatttatgccatgtttcattatctgaattatgaacagaagtataaacgtcaccatcctgattgggaacaacgcttaaagaaaatgctcgatatgttcttgcaactgcaaaatccagatggaagttttccacgtaaattccatgatgactttacagttgttgacggaagtggaggaagtactccatccgctacattacctctggttatgggatataaatattttaaggacaaacgctatctgtccgctgcccggcgtactgcggaatatctggaaaaagagcttatatcaaaggctgactatttctcctctacgctggatgcaaactgtgaggataaggaagcttccctctataccgctacggcaacttactatttatcattgataacaaatggtacggaacataaccactatgcctctctgacacgaaaagcggcttattttgccttgtcctggtattacgtctgggacgttccgtttgctcccgggcagatgttgggtgatatcggtctgaaaactcgcggctggggaaatgtctcggtggagaataatcatattgatgtatttatttttgaatttgccgatgtgctccgttggctttccaaagagtataatgaacctcgtttctctgattttgctgaagtcatttctacttccatgtgccagttacttccttataaaggacatatgtgtggagtgataaaagttggttattatccggaagtgatccagcacaccaactgggattatggaaggaatggaaaaggatattataatgacatgtttgctcccggttggacggtagcatccctttgggaattgctgacaccgggacgtactgagaatatactgttgaaatagctctgatatccacttttcaggatattcttatatcctgttgtatgttaattaatgaaactaacaattaagacaatgcagagactacgtattttagttatattaatacttctttctttgatgcctctttattcccttgccgttctgaatgaaggacaatatgcattccgttcacttgatatcaataatggattatcccagaatacggtccatgccatccttcaggataaacaaggatttatgtggtttgggacgaaggatggtcttgaccggtatgatggtatctcttttcggactttcatgaaagaatccggaaccttgggcaataatttcatcacttctttgtatgaagacaatcttgggcaaatatggattgggacagacgtaggcctatatgtctattgcccacaaatggaaaaggtcaggcattttactctgataagtaattcaaacatagatatagactgtacggtcaatctgataactggggaccagaaaggaggtatctgggttgtaactcagacgcggggaatcttctattacaatccccaggatagccagttggttaattatcagtcggacgggtccggtactctgaaccttaaaacttccggccaactctattttgattcggacgatgtctgctggttggacatacgtgatggaaatctgtattattcaaaagacaagcttaaaactttaactccgatttttccagaagattcaaaagtgtctttcagagatgaatacatctataaattgctccccggaccctataattgcatgtatgtgggaactgtattcggactgaaagaagtgaacctaactaataagactatccgtacccttctttccaaggatgaattgggaggtgatatttatatcagggaacttgcattttattcagatgacgaattatggataggaaccgaatcgggactttatatctataatctgcacacggcaaaaatcatccacttgcagaacgtcaacggtgatccctattcaatctctgacaatgccatctattcgattctcaaagaccgtgaaggcggaatgtggatagggacttattttgggggtgtgaattattacccccggcaatatacctactttgataaagtctatccccagaaagaatcaaacaaaatgggaaaaagggtgcgggagttttgtgccgcccatgacggcacactctggataggtacagaagataaggggcttttccattattatcctagtactggaaaaatcgaaccgttcattcatccggatatttatcataatgttcacggattgtatttggacggagattatctgtgggttgggaattttgcaaaaggattgaagcgtattgatttgaggacatacgctgtaaagcactatgataatattgcaagtgatatcttttctatctgccggataactgcgggcgatctgtatcttggaacaacaataggattgtttcggtacaacccagatacggaacgttttaaacgcgtccccgaacttgggtggacgtttgtttattatataaaggaggataagcaggggaatttatggctggcaacttatgccgatggcgtctataaaaagaatgtccgtacaggtggttgggaacatttcgtacatgaggaagcagactcgtccacccttccatccaataaggtgctgagtatttttgaagacagtcaaaatcagctatggtttaccacacaaggaggtggcttctgccgctttgtgccttccgccaacacctttgtccgttatgacggtatcggtctgccaagcaacgtcatttatcggattgaagaagatgaaaagggattgttctgggtttcaaccaataaagggctggtgcattttaacccgaagaattccagttttaaagtgtatacagttgctaatgggttgctgagtaaccagtttaattaccagtccagctataaggataagaatggacggatttattttggctgtattaacggtttcatctcctttgccccctcctcctttattgataatgattttttaccctctgttttgattaccgattttatgctctttaataaaaaggtggtagtcggagaaaaaggctctccattgaaacaaagtatcactttgtcaaaccatatcgaacttcagtcaaatcagaattcgttctccttcaggatagctgcgataagttatcagtcaccgagcatgaatacactgctatatagactggaagggtatgattccgaatggcatacagcgggtaagggccctattacgtattccaatttaccttatgggacatacatgttacgcgtgaaaggtgcgaatagtgatggtgtatggaatccagatgtacgcacattggggatcaggatattgcccccgttttatttatccgtatgggcatacctgatttatatcctattgatactcggtacatttttcgccctcttcttttatttaaggaagcgtactattgaaaagcagcgtaaagagatggagaagttcgaacaggaaaaggagcaggaactctacaccactaagatagatttctttacaaatgtggcacacgaaatccgtactcctttaacactgataaagtgcccattggagaatgtacttgctgatagggaactctccgaaaatgtaaggatggaattggaaattatggatcagaacgtggagaggttactgaacctgataaaccaattacttgatttccgtaaagcggaaaataaaggttttaaattgaatccgaaagaatataatatcggtactatcgtccactctgtttataagtatttcaccactttggcaaagcaaaggggaattaaacttgaagtagaagttccagaggaagaattgttggcttctgttgacaaagaggctttgaccaaaattctcagtaatctgtttgctaatgcattgaaatatgcccggacatacgtttatctccatttgtctgttgatgagaagaatgaggtgttcactatctctatgagtaatgatgggaatatagtccctatcgaaatgcgtgaaaatatttttaaagcctttgtccaataccgggacgggaaagatattgtctcgggcacaggcatcggattagctatggctcgttacttggcagagttgcatcaaggtatgctggtgatggaccgggagctagattgtaaccgtttcattctttccattccaatattacaccagacacttccggatgattcggaagaacaacataagaaacctgggtatgatgatgaagatcgtgaagtttctgataaagataaaagagaggttgcttccatattggttgtagaagataataaggatatgcttgcttttgtgttcaggcaattgtcttcattgtatcatgtactgattgcggaaaatggggtcgaggcgttggacgttcttgaacagaaatctgtggatctgataataagtgacattatgatgcctctgatggacggggttgaattatgcaagcatctgaaacaaaatctggactatagtcatattcctgtaatattattgacagctaaaactaatctggaatcaagaatcgaaggacttgaagaaggggcggatgcgtatattgaaaagccgttttctatggagtatcttcgtgccaatgtagcaaatctgttgagtaatcgggaaagattacgccgtcactttattgaatttccttttatcaaagcagatgcaatggcgcagacaaaggccgatgagatgtttattagcaagttaaatgagtatgtattacgccatcttgataatacggacctgcaaattgatgatatagcggatgcaatgaatatgggacgttccaacttttaccggaaattgaaaggaatcctaaatatgagtccgaacgaatatctccgccttttccgtttgaagcaggcagcttccatactgaaagaaggaacctatggagtggtggaagtctcttacatggtagggttcagtaccccctcctatttttcaagctgttttaaaaaacagttcggagtactgcctaaagatttcatatcgcactagtaatatgtattttgctttaaattttataatatcaggtcattttctgatattttatccgagttgttccgggtaattttgcaaatatattaacaactaaatttgatgtatgacaaggtatttacttttttttgccagccagccttcgggcggaagagagagttgttttcctatcgtatatataaacgattcttagtttgagaatttgtactgtaatttatataaagtcaaagaaataattataaaataaattgcacacacaatgaataatagaaaagaaaatgaacagagttgtatagtaatgaataaaaaagagggtacatcgtgcattacgacacacctccctgtatttcagagaaaaatctacactactaatcaaaaaatctattgatatatgaactgtaaagtaaaacaaggatgccttaccagcgaaagctgttgcatcctgttatggttagccttcacattatttcccgtttccgttgtaacggcggcagataatagaaagatcgacgagagccagcaaaaagaagtaaaagcagaaatgaaaggatatgtgggagacgaaaacggagagcctgttattggagctaccgtattggaaagtggaacgcagaacggggttataacagatgtggacggtatattcactatacagttggcaaagaacgcatcattgaccatttcatatgttgggtaccagaagaaaacggtagtggtaaaagataagaagttcatttccgttaatttgactccggacaggagtatgatgctggatgaagtggtcgtggtcggttttggcaaacaaaagaaagaatccctcgtgggagctgtgcaggcagtgaagccggaagacctgaagatgacatccagtaatcttagtacttcatttgccgggaacgttccaggtatcatcgccgtacaaacacagggtgaaccaggctctgatgaggcgaaattctatatacgtggtatatcaacttttggttcgaatacctcaccgctgatcatacttgacggtgtggaaatcaacgctacgatgatgaacaatattcctccagaatctatcgcgtcgttttctgtgctgaaagatgctacggcaacgtccctatacggctcacggggggctaacggagttatcatcgttactaccaagcaaggacagctttccgagaaaatgtctgtagatatccgctttgataatactttctccatgcctacctatgtgcagaaaatggcagatggcccgacttacatggatatgtataatgaagccgtttataatcaggctattgccaataaccaagagtatgagcctttctatagccgggataagatagataaaacacgtgccaatgcaaatccctacctgttcccaaacaatgactggtacagtatgttgttcaaagacttcgccgttaatcagaatttgaatatctccatcaagggcggaagcaaaaatgtggattacttcctgaatgctggaatcttctatgaaaatggtatcatccggcaacccaaggaagataagcttgatgtgggtatgcgcaacaagaaatacctgtttcagagtaatgtgacagcccgtgttacctctacgacgaaagtggggctaaatatgaatacgcagttgttctaccaccatgcccccaaaacaagtacccggaatttgttcgcctattccatgcatgggaatcccgtacgttttcctgctacacttcctgctgaaccaggggatacatacatccgctacggtagcaatgatccgtgggatgtgggaaaatcagagccgaatccttacgccaaattgagtgaaggttatacggaacgaaattatgtctatatgacgaccgctttcaatctcgaacaggacttgaagtttgtcacaccagggttaaaactcaccggactggcatctttctataattacagttttaactggctggatcattggattgtacctttctactataaagtatctgatgactatacgatggatgatcagggaaactacctttataagacttcgactatcggtgagccgggagaaccttatctgaagagcaattccgggcgtgatccgacagagagtgtctggtctttacagggagcgctggactactcacgccagtttggtggacatgatgtgggagctacccttgtttaccacatgaaagaaaccaagaaagtgaaggacggcggagctgaaaaagatcttcttccttaccgtgagcaagggatggccggacgtctgacctacagttttggtcagcgttacctgcttgaggctacctttggttataatggctcggagaatttcagaagcgggcatcgtttcggattcttccctgcgattgccctaggatggactatttctaatgaaaagtttttccaaccgttaaaaaaaacagtttccactctgaaaatccgagctacttatggattgaccggaaatgatgcgcttgccactcgctttccctatgtaacagaagtcagtatgaataataatttggattggtggactggtagcggtacccgcgtgaatgggccgcttgtaaatatttatggtaatgcgaacgctacatgggagaaatcgaaaaagctgaatttaggtgtcgatatgacccttcttgaatctatggatataaccattgattatttcaaggaagaccgtagtggaatttttatgcaacgttcgtccgtcccttcaacaatgggagtgacaggtatgctgccttatgccaacattggctcggtaaagaataagggtgtggatatgagtgtagcatacagcaaagtaattggcaaagattgggtgctccgcctgaacggtagtctgacctatgcacataatgagattacggagatagacgaaccggtgaatgtagaaccctattcttcaagaatcggacacccgataaacagtattatgggatatgtgtctgacggattgtttacttctcaggaggaaatagacagatctcccaaacagtcgttcggaaattatacggtgggagatattaaatataaagatctgaatggtgataacgtggtgaatggttatgacaggacgattatcggcaatcctgaaattccggagattatctatggttttggaggaacgttgaagtataaaaagtgggatttgtctctgtttttccagggagtggccaaagtcagtttaatgatgagcgatattcatccgttcagcgaagcgggccataaaggatataacattgcacagtatatcgttgatgaccactggtcggaaagcaataatgtagccggtgccgcctatccccgattatcacccgaatttatcacgaacaatgcgcaaaccagcacttattacctacgtaacgcagctttcctgcgcctgaagaatgccgaactgggctattccttcttcccgtggctgcgtgtgtatgcagcaggtactaatttgctgacattctctccgttcagtacctgggatcctgaaatgggaagtgggaatggtttgaaatatccgctacagcgcacggccaagatcgggattcagtttcattattaattaagaacagaataagttatgaaaaatatatatacaaagttatgcctgtcggcaatcggctgtttaatgatggcatcatgtgattttcttgatgtggttccgcaaggtactgctaccgtggatgatatctaccgaacacaatatcaggctgaaggaatggtactgtcttgctacgcgaatatccctaactatttccatccccaacaatttcctgattttaccggaggaaacgaaatcataacgagcaaaggaggaacaacgcgctggtttcatttccgcagtctggtttatggggaagaatccccaacaacgacttattactcattatggagcaatacagcaaaatcttatccgcagggtgctgtgaagaaagcagtatgggaaagtatccgcaattgctataatgtgcttaataatctggatagggtatcggacattacccccgaaaacctgagctggtggaaaggtgaagcgctgtttttgatcgggtattatcatcagatcatgctggagtactatggaccgatagttattattgacaaggaaataccaatggaaagttctccggccgagatgatgacctcccgttctccttatgatacatgtgtcgatttcattgccaataaatattcggaagcagctagattacttcctggcgtatgggattcaagtaagagaaacagggctacctcttctgctgccttggctttcaaggctcggctgttgctttatgccgcctcgccgttagtcaatgggaatagtgagttttattccgactttaaaaaccccgacggcacttttctgattaaccagacttatgaccgggaaaagtggaagagagcgatggatgctgccaaagaggccatagacctttgcgaagagaacggttacaaactttatggaaattcgaccaatgacttggagcaagggaagaaaaactatcatgaagcctttgtcggtgatgggatcagtggtagcggatttaactggaatgaagtcctgtttggctttgctgaacagggaactatttcctactgtatcaagaatatggctcctcgtgttgaatttacaagttattcgaccaaaggttttagagggtccttattcccgacgtgggattgtgtgagtaggtattataccaagaacggtctaccttgggcagatgaccccgagactaagaagcttgatccgtattccattgcaccaggtgatagtacggtacgttttcacaggaatcgtgatccgcgcttttatgcctctattggctttgatcgtggaaattatgacgtgcagggaaagacaatagtgctcaaatgcagacgtggtgaaatgcagcagaataatggcaatgccaaggatgagtatcaaacggacaacggttattattgtcagaaatgggtgtctaaatatgatacctataataggactaccgatcaaataacctacaaccgttggtgctttccttatatgcgtctggccgaactctatctgagttatgcagaagcggatttcgaatatagcggcacactgagtactgccagtctgtcctatttgaataaagtacgtgaacgttgcggattacctacctttgcagattcatgggcaaaagccggtggtattccttcaggagagaagttgcgcgaaatattacatgatgaacgctccattgaattggctatggaaggcagacgtttccatgatatgcgccgttggaaaattgcccatactgaaatgatgcgttatcagaaatcctggacattatccggaaaaaccgctgatagtttttataaacttacggacatgaaagaaaccggcgttcgtaattttaccgctcccaagaactattggcttgctattccacaagatcagatagaagtaaatcccaatctagtgcagaatccgggatactagagaatcagctcttatataactaacaattagaggaaaggacaaaatgaaaaaggtaatgtgtttattggcaattatgtttatgattgccaatacttcggcacaaacacgggtgattgcccatcgtggtttctggaaaacccaaggatcagcacagaatagcattacatctttgttgaaagcggattctataggatgttatggttcggagtttgatgtctggctgacaaaagataatggtttggtggttagccatgatgggattattcaagggcataaggttgaagagtccactctgaaggaattaaccgggttatggttagcgaatggagaatgcgtaccctccttaaaagagcttctggaaacagctaagcggaaaacatctttgaagctggtgctggagttgaaagctcatagtaaacccgaacgggagataaaagctgttgaagagatcgtttcgatgataaagaagatgggactcgaaccccggatgatatatatcaccttttcgtctcacgcattaaaggaactgatccgtcaggctcccacaagcactcctgtatattatctgaaaggggacttatctccacaacaactgaaagaattgggtagtgccggaccggattatcacttctctgaattttaccgttataccgattggattgaaagttgccatgccttggggctaaaagtgaatgtatggacggttaataaaaaagaggacatgcaatacttttgggataaagtcgactttatcactacagatgagccgttgggactgttgaaagatataatgaaggtcaaatagatatattttctgagataatgtatagtccaactgattacctttaataatctgttgattatttatgtttttggaaaatgagtttcaagttttcaaacgactgttcatgttgatacagttgaatgctgattgaaaacaaaacaatagcggaaacaatgaatgtcaatcttgtataagaaggcaaacgtccaaatttatagttcagctccattaatcgaactgaataggggtatttattaaataatataaaattagccaactaattcatagccaaattattgcgaattagttggcctttttgtatctttaggtattccgtgcgacaagaagtcgtacaagtaattgttcagcactgtgcctgaacctattgttctgtcaatagtagtctaaagaggcgtgctttaccaagtcatggtttagtgcgaagccctcttgacaatgcagtcctttacagaaatatccaatgtataggctgttaggctgactgatatgagtaacatatgtgaatcgctacaccatcgtaataaagaaatagcttacggatatttataagctatagccaaaaggtgggtagtcaggatagtcttttgggaatgtaaggctacacggacatcatactggcggtggaggggcgggctctaagtcgggcgtcagttacttgtacggaacttggtaaacccgtatttctcctgtctatgtcaggcaggtaagccaattgcaagaaaagccgaatgtggtgcgggtaaaggattgcggagaaagtgaatgattctgtgtaatgcggaggatagaggtttaaacatcaccccatgcgaaatcaggcagacttccgcagggtaattctttgtgaaacgattgtagaactttaataaaatgaagaaactgcaaatgagcaaggcaaaagccgagtgtgcatctttaaccgtacgaaacacgacatgaaaagatatcgattcttccaaatatgagcgtaaagtgagaaaactgcaggtccgaatagcaaaggcccacaaagaaaagaggtacaacaaggtaaaggccttacggtacctacttgccacttcctacgaagccaaggcattggcgataaggaaagtaacttccaataaaggtaaacgtacggcaggggttgaccatatgaagtgggacactgatgccaagaaaatagaagctatatgtttattgaaaaggagaggatataaggccttcccgctgaggaaggtcaacatagccaaagcaaatggcaagacaagatctttgggaataccaaccatgaaggacagagccgtgcaggatatatcttatggctttagaacttataactgaaagtgaagcggatgcgaactcatatgggttcagaaagtttagaagtactgcggatgcaatagacgcacttcatagatggttgagtagagactgtttaccacaatggatactggaaggtgacattaagggttgttttgatcatattaatcatgaatggcttctcaacaatgtgtagattgacaggctggtattaaggagatggctgaaaagcggagtagtatttaattgcaaagtatcaatagatacgctacactttttcttttcgttggcaaatcttaatccgtatcttcgttgcatgaaagaagatatacggatgcgccaaaaatggcttgagctatacgtcgaaacgggttctgtgacaaaaactgcccttcggtgcgggattacccgttccacgttataccgttggataaattgcgagaaagaacaaggcaagtcggaattgtccgataagtctaaacgttcatcaagacttgccaatatgaagataacacctgaaattgaaaccattatccttaatctgtgcgtgagacaagaagatggggagcgcaacggattgccaactatctgcttaggaagagaataaagctctcaggcatgacggtgtggcgtgtgttgaaaagcatcaggtcaaagctgttgtgaaacgttgcgagaaatttatttcttcttccagccgattttttccatcggcaacatccggataaccatatacccccgccgttgttcatagcggcaggaaaaacatgcctgacggcgatacgtgacgcacggcactcaaaccctctattccaacgtgaaactgaccgcagagagggatgccgccacgggcgacctcgtgtggaagtccaaggacaacacgacacttgtggggggattgtcggatgagcactactacctctactatccctactaaacggatatgagcggaaagactgccactcccacaggctcagccttgaccgacacggaattcttcgccccgttggtttccgcttggcagcctcaggacgaccaaagtactcatgcggcatataccgcctccgacttgatgactgccgaaggctccgcaacgacaggggaagacaacaccctccacctctctttcaccatgaaccatcgtatggcattggccgtcatcgagatgccgaataccgttaaatacaagtttaccgacgagaggattcctgattacgccgtgtcacccgccactacattctctggcattgcccagccgctgcgcgtgaacgatggtacataccgctacttggtgaatcacgcgactcccgcaccgactatcgaaggacattatgacgagggaagcaaggagttcaccataaccccgtccggcctttctaccggcagttacaagagatacaaggtggacggcgcggtgacaactgtaaaggactacacgatgcaacggggagattacctgctcgccgacggcaacctgctgcctaagggtactaccctgaccgaggagcagaaggcaagcgtggcggccatcgtcttctggacaccggcagagaccaatcctgaaggacggatcacgccggcgtctctggatttcgacaagattatggtgaaagaacatcccaattgcacccatggccttgccgtgtcgattaaagatgctccgggcaacgtctcgtggcaaaacgttaacgactgggtggcggattttcaaagaggaacagatttcaatcctgtcgataaggatgagtacgtaaacattgccactggtttcgatgcgaccggcaacataaacaggatactcggttaccagaacacgaaagtgctgtgggcgtataacggatattgcaagacaaacggcaaaaccgatgccttggtcaatcctgctgaggtcctgaaaacatttatcgcaaataatccagccccggcaaacagcaccggatggttcttgccgtcggtaaaggaactgcacatgctatgttataaggatgtcgataatattgcgtacacacgggacaacacagagacgagggatatagtcgaagtctccatctccgccgttggcggtgacgcattgtcaccgcgcaataaccataaacgtttctggtcttcttcggagagccccagtaataagaatggcgcttttagcgtgtatttctacaatgccttcgcacagctcagcgaaaaggacggcgcactcaatgtgcgtgccgtgtgcgctttctaaccacataaaacaaagaaaaataacgatgtgaaaggaacaggatattccggacgatggatgcgcatcagcggctggtagccgatgttgatgctcgcgggcgggctactcgtctcttgcggcaagatggaaacgggagaatctactacacgtttacccgatggcaagtacccattgcgactgacagcggaggtggcgcaaccgcacccccgtgccggcggcaaggagataggagtgatgctggatggcatgctcagcctccaaaggtacgtaatggacgcctcgggcaatactgtcccaaaggatgctgaaaacaccatttaccggaagagcactaccgagacatgtgtcacggcacggactccgaatgccgatatcgaccaaagtggcgggtatgccggcttcggccttctatacgtcaccgtagtgggaggttatgaccaagccgtcagcctccgtttcaaccaccgcatggcaaaagtagagttcacgctcatggcgggcgaaggtgtcacggaggaaaaacgaatgaaatagacgtggtgcagacggtgccgggcaacacctggattgatggcggcgaggagaatgtggcggtagccaaaacaatacactacactgccgatgaagtgaaggctggggactacatctattcgggcaggagcacttcggacggcggactgcgcaaacgctatcccaatgggaaagctcaggtcatcgcagacccgaagccgcaatccgtagcgggcaagacggtcgccggtgtcgtcttctgtataccgaaagacactgaccccacaggcagactaaccccagcccgacttactgatgataagattatgatgaaagattttccgaatgccgaaatttggaattatatagtcaacccatccctcgtcgctgccggcggtccgacgccaatttataccacctcttactggtcgtctacggaggcatattatagccctaacaatgcatatgccatacactttccagatgccactctggaaagtaatgataagtacttataaagttaggtttctggccgtgtgcgctttttaatcacattaaagaaagaaactgtagcaaagcattctacattcgattccggcggcggtgctcctatcgcttgccgcctgtacgcaagaagagctcccgggcaaccaagacaaggcgcagcaacttactttctccgttaccgatggtggatatacgtcggctgttcgcaaaaccacccgtactgtggagaatggctgccaaaccaagttttccgaaggcggggcctgcggcctatacgtggtgcggggcactcaaacagtctattccaacgtgaaactgacagccgagagggatgccgacacgggcggtctcgtatggaaaactgaaagtccgacaccgctcacaggcgggctgttggacgaacactattatttctactatccctatcaggcacgagcctcaatactggggcagggcggctgttcgccttcatcattacggtgaacgagttaaccgtgcccggcttgtcggtgcggagcgaaacatacaccatctccgacaataagacctgccatatcctggagtctgtctgcccgtgatgttatcctctcatcgaattcctgtactcactcgggctcattccatagtacttcctgaacacctccctgaaatatctgacatcggagaaccccgagtcatccgagatttccgttatcgaacagtctttttccctgagcagttgtgccgcatattgcagccgcatggagcggatatagtcagccggggcatggccggtgagcgccttcaacttgttgaaaaatccggtgcggctcatgttctgcatgccacagagcatgtccacacagaaaccggggttgtcgatattcttcatgacgcattcccttacggaggccatgaatttccagtcccgggtattgtggcagtccggcggaacctgtccgactccgtcctcaagaccggcgtatgcccgtttgagcagtgcccggtttgccagtatgttcctgatattcgccctgagcacgtttatgctaaacggtttggtgatataggcgtcagctccgttttccagcccctccagcatgtccttctcatctcccaaggcggtcagcagcatgaccgggatatgggatgtctcaatatcggatttgacggacgcgcaaagttcgtcccctcccatttcaggcatcataacgtccgaaagtatcaggtccggattgtattctctcgccacaagcagcgcgtcccgtccgttggaacaggtttggaccaggtattcctctttcagcagcccctcaaggtaggtccgcaaatcgtcattgtcctccacaataagaatacgctgccggtccccgccggtcattgttggaaggatctcacgcatggggccgcaatccggtcccatgcgggtttccccggtatcctgtttcctgggcgaagcaacggggcatgccttgtcaaggcgtctgctcctcaggggaaaaataacacataccatggtccccttcccctcggtactggtaacgcggaccctgcctccgtgcagccttaccagcctatgtaccatcatcagtccgacaccgtttcccgccacttgcagattgacggcattactgcccctgaaatggttcctgaacagtttcttccgttcctcaggtggaatgccaatccccgtgtcttccacttccacaccccatacatgccggtccgcgaaggcacggacctggatactcccgccccgtggagtgtacttcagtgcgttggacagtatattcttcaatatagagtccattttgtccttgtcaaaccggacattcaggtaagggaagccgctctcacgggtgatatcgatgtccctgatggaggcatatgtgcggaatgcctcacaggtcgtctccagataactgttgagctcatattccgagacatgaagtctcaaggtgtagttgtccgtactctcgaaatctatcaggctggtgaccaatcccagaagtccgtccacgcttttcagggccatccgtacattgtccatcccctccgccttcaccatgtctttctccaccacctcttccagcggagccttgatcagcgtaagcggagtacggacatcatgggcagtatgtatgaagaagcacgtcttttcgtctgatatccttttctgcctgcgcaacatggcaacgcgaaaagacaccaccccagccaacacacacaatgacgcatatccggcaatggcccatgtacccgcccacagcggccgggcgacactcagaccgaggcttctttcctcatacaccttgtatttctcctcattggagacggcacggatacgcagggtgtagttgcctgggggcaggctcgtgaactgtatccgcccgctctggaccggatggctccagccctcgtagagcccctccaatttccatgaatataggatgttcgagggatagtcgtagttgatggagacagcttccagggagaaggtattctggtcatatgcaagttccagcctgacggtattgtcaatatcctccctcaagggggatcccttgtccccgggatagacggggcggtaggagatcatgaaatcccgcaggagcatccgagaaaaatgcggggcgggtatcctcatgtcggaggggaacatgacggctccggtgttactcccgaacacgaagctttccccgtgccggaaagtggataccccggcattgaggcatacgcttgccagcccttgttctgccgtccagtttctgaaagtgccgctctcacgccggaacagggccacgctgttttcggtccccagtagcagggtgccgtccgcacgggggacaatggtatggatgttattggatatcagggcgcagttctcggtctggtattggcggacgaacctgtcctccacgctgtcatagacgagaagtcccgccccgccggtgccgatatacaggagcccgtccggtgcctggtacagtgcatagacatgaaccgcctcgactggaaaggcgatatgtctgcaggtccccccgtgcccgtcaagcaggtacaaccccatgccggtaccgatccacatccattccggagccttctccagtatggcggtgatggggcccgggaccgggtacaggcgtactgtgccgtcatggggatcgaaacgtttgagattgtggcagccccctgtccatatacatcctccggaatcttttccgatgtcattgatatactggtctggacgcccctctgctgcaaaggaggggggaaagtattccaccctcccggttttcttttcgatcctgtacaggcccgaagcgtacccgccggcgcagatgacacccggcgagacctcgcagagcgtcaggaagatatggttcccgccatcctgtatcccatcggaccggctgagaaaggagcgccaccgtcctaccgcaggctgcagcaggctgatcccgttgctggtggcgaaccacaagtcgccttcgctgtcttcgatgacatcatgcacctgatcgttaaccagcgaccggctgttgcccggtgagtgccggaaccattcatagctctggtagcggttattccggattgtgactccggcggggtagttggcaagccagatacggtccccgccatccacataaatgtcattgatattgtctccgttcatgccgttgtggctggcgtagtcggcggttatatagggtttgggcactagcgagtccatatccatcctgtataccccccttccgcccgtggctatcagcagctcccggtcattgagaggggtgatccggttgacggccacattccgcagcgtactgcctgcggacactccgtatacaagtatgcccttcctgaaggttcccacgaacagtttcttcgaaccggggtggtagtagagttcgctgaccggcgtccggatgctgtccgtgtccgcaagcgcctcaaggacaccgtccctttcccgtaccggaaaaagtccgttcacggtaccgatgaaaaggtttgtaccgtccgtctcgctgatagcggttatatcacctcttaaacgggagaccagccgctgcgcaatgcctgtgcgggtgtcatagcggatgatatggtcaccctgacagagccatatgcggtccccacggtccatataggcgtaacagagcatgcccgtggcgaagtcatcctgaagaccgggtatcctgtataccatccggaaacggtcatggagggtgtcgtaatggaaaatacggcctttccttcccacaacccacagcgtgttctccgtgtcggtgtagagccagttcagattgacttgcggggccaccttcagattgccgtcaagaacagtgtaatgcctgatccgcttgccgtcataacggtccatcccctcctgggtgaggaaccacatgtatcccctcccgtctttttggatacggtaaatcctccggttactcaatccgtcctctattcccaagtatttatatatctgggctccgcacatggaggaaattcccagcatgaggaatgcggacagtattcttcccatattccgaacacgtgtcattctgatataaattagacaacaactgttgcaaatatataaaaatataaattaatatacaaatttaaacataacctcggatgtcggcatcaggcggtatgtcctcaatgtcatgtaccccggaaaatagctgcatacgggaccggcccatgatatgaacatattccgagaggcggttgttcaattgacccgacggaattatggcttgccgggctcgggactgtccgcaagggtacgttggtccggtgtgcggaataccatccatacctccggtccgaatttatatccgcgggtggtacaggtgccggtcgaggtttggcagcccccaataaagcgggccgaattgtttgtaagcactcttaccctcatgcccgatttatagataatcttccaacagtaagaagttataattcgcatttaagaacaatggcgggcatttcttgttaatattataatcatataaaagaggcgcatccgttagtgccagatttgttcaccactttcatcgttgcgtatcgtattgcgagttgtccgtatcagatgtttatcccctctttcttaagacttcctgagaactgcctgggaaaggacggctttccgcattgcgacttcatccacagcccttggcggtatagccatgcctttcacggggactacggttgattcatgcgacacagcagattccggtgctataacagggttgcctacatacttgtgcctcttttcagcttgctgtccagatccgagttgcgcactttacccgcaggttggacggttgtacataacaatattgatctttttgagggctaaaagtcgaatatccccttaaagtaagcgcctgagtaagtacatcttctacagttcattttccctccttacttttgctgcaaaaaaaataatatcctatgatgcagcgacgtaaacacatgatgagcagagaaaaatttatctccgttcttttccgtcagcagcagagtggtttgtccattgctgatttttgtgagaatgaaggttatagccgtagtagattctatctttggaaacaaaaatacggtataacggagcgggagttattggcagaagcctcccgcttaggggttaaagacagctttgtccccatagtaatcaatggcgacacgccatcccccggtatatctcacgaggctcccctgccatctccccagcctagcgtcccctttcccttgaaaggaaaggacagctctgaaatatccttggaattacccaacggattgaagttgaagtttaaagggtcttccggctgtgaagctgccctgaatctgatctctaaaatatataatgccaatgttctgcctaaatgacagcatgagatatttcctgtgccccggttatacggacatgaggaaaggtatgttcactctttgcggccttgtgcatgagaggatgggaggcgacatcagaagtggggaggtattcattttctacaaccgtttccggaccaagataaaattgctccatgccgaaccgggcggtctggtcctttatgagaaactgcttgaagaaggcaccttcaagatacccgcctataatcctgccacccgttcttaccccatgacctggagtgacctggtcgttatggtggaaggcatcaatgaagatgtcagcaaaggcaggcaaagacggctttccaatttgaaaaagcattggtaaaacagttgtaaacaaacagcttgaaggcttgtttttcttgttgtttttgactatctttatatcatcaaaaaaaagatattgaatggcaaaagaagatgcaaccggacaagctgtggaaccctcaatggagcagctgctggatatcaaccgtaaacagagtgagatcatctcagcccaggcaaggaccatagaagaactccggggtacgatagttgagttgaacgcctccctggcatggctgaagaggaaggtgttcggaaagatgagtgagaaatgcaagcctgtcgataacggagacccgaagctcccttttgactatggcgacctggaacagatagaggcggaaatcgaagatgcccggagcagggcggctgaacagattaccgtccccaagtcccgggccgccaataaaacgccgcgccgtaaccgggtcgtcatggataaccttccggttgtaacagtcgtcatcgaaccggagaatgtcgatttaagcagatacgtcaagataggcgaggaacataccaggacccttgagatgaaacccggctacctctatgtgaaagacacggtacgtcccacatacgccctgaaaaatgaaatggaggccgttgataacggagaaaaggctgtaataaccgctcccatgccactgatgcccatatataaaggtatgccaggggcttccatgctcgctgaggtccttttacagaaatacgaatatcatgtcccgttctaccgacaagtgaaacagctggaacatctgggtgtgaaactgtccaaaaacacattggacggctggttcagaccggtctgcgagcttctcaggccactttatctggaactcaggaagaaagtactggccgcagattacttccaggttgacgagaccacgcttccggttataaaccacgacaggcataaagccgtaaaagaatacatctggatagtccgagcggctgtgccgcgtctgccttcttccattacgacaacggatcgcgttcacaaaaagttgcggtcaggcttttgaaaaacttcaaaggatatctccaaagtgacggccatcccatttatgacgcctttgaggatggggaggacgtatgtctgtgtgggtgtctcgcgcatatccgcagacatatagagctgtgcaaggaagaaaatctggaatatgccatgcagggactcaaatttatccaggatatgtataatgtggaatacatggcggataaacaggaactcccgtatgaaggacgtgctgaattacgccaacgtctatccaaaccgatgcttgacagctttgaactctggcttaaaaacacataccctaaagttctaaaacgaagtcttatgggaaaagccatagcctatgcctactccctgctgccaagaatgaaaccgtatctccatgacggaagaattttcattgacaacaatcgctgtgagaatgccctgaggccactggtcatatcaagaaagaacatgctgttctgcggaaaccacgaagcggctgagaatacggctataatctgttccttgcttggctcatgtaaggaacgtggtgtcaaccccagagagtggctgaatgatgtgatcagtaaactcccctattatctggctcccaaatcagacagagacctgaaggaactgctaccggatgtatggagaaaataatcaggacagttccgggaaaatgcaggaaaaaacgggaaaaagcgagactgacactcaatgacaaccctgagataagttggtatatggaaattgagatgcacttacaatggagtgcatcccactgaaaaattgaatgcacaagatgtagttgagcagtcgcttaccccttaaaaacaaggagctgacgcatgtgtacagccccttattttttgtatagcccggcctcctctggcatattgccgttgcttccatctgtaacaagcaaaatcagaatctatatgcggaactttttgttcccgtagctgagaaagtccttcgtggcatatttcacactgaatggtccgtagtcaccgagagccgaatgcgcaatttgcttgtccggttctgtcacatgctcgacaggttctcccgtagtatcagtatccttgtatgacataggctgcatgctggcgatggctgacccggtagccgccgcacgcaatttcctgaacgcattggagaggattccgtccatcattgaccagtacaaggcgaagaacgaggtgcaggaaaaggaggtctcacagttgtaggagatagccgggaaggtatggaagaaggaggacgaactgaaacagttgaagtccgaacttgcagcactcgaccgaaagatacagttggagcttgagccgcctacgcccgaagtcgccgaaaaggagaatgacggacaggaggtcaaaccggatgcggaaggtgtacgaaacgtatctccacaacacaccgaagatgtgccgcagatacgcagctcggtgaatgaacgcagtccgtctggcaattttattgccgaccacatcatcatcgggcggccgggattcaacgtccgtgacgagtgcaaaccgaaaggtataaaaatgtgaacgagtgtgcggatatatatggcaggattgggaacataccattccttttcctgctttttccatcaatatgacataatggcaaggataccatacaacaagccctcgattatatcaaaatagggtgttgaaagtaaatcgtcatggcaaatccgccatatattcagtattttcgctaattttgcattcaaaatagttaggcataataaaatggaaccatctatatacagttattcactttgtattgcgctaccgttgatgttgttcttcggcttttattttttgttggctccaacctcggaaaaagccattttcaataattatctgcgttcccggcgaattatgggggtagccatactgttacttgccgccaactattcggtacatttcttttttggaatcaggttcaagaataccgatgccgccatcctgatgaacctgtccacctattttttgtgctactggttgttcagttcggccctcaccactctgcttgaccgcttttatatcaccaaatgtcggttacggacgcatatctgtctatggatactgttttccatcctttccggcatcgttctgctgttgttaccaaaaggtggtttacagacaacggtgatgtttgccttggccgcatggttggttatctatgggctgttcttgacccgtaggcttctccgggcctatcacagggtcatccgcattttcgatgacacccgtgcggacgacatcggtgcctatatcaaatggctttccattttcacctactgggctgtcacattcggggtgggatgcggactgctgacattcctgcctgatgaatacgtctatatctggattctgtcatcggtaccgttttacatttatctcttcctttgctatctgaactatctgctgttttacgaacaggtggaaaacgcgatggaagatggcatgacttctgaagaggaagacctgtgtgacaccacaaaccgggaacaggcacagaggcaggatactccttttttccatgccgaaatagcgaaaaaaatcaaaggttgtatcgatgcggacggttatatccggcccggccttaccataaaggagctttcagatgtgcttcataccaaccgtacctacctgtccgggtacatcaaaactacgtatgacatgtcgttccgcgattggattatcggacttcgtatagaatatgcgaaacgtctgcttgcgcgatatccgaggttgacggttgccgacatctccgagaaatccggttttttgtcaccaagccattttataaggctgttcaaggaaaatgcgggctgtacccctaaatggaggaaaacagaggcggaataatacggtgtgttatggatggaggaatagcccaaacgacaaaaaatagcctaaactacaaaactaaaatgttctaaaccacaaagatgtgcgattctgacaattgagacaatttttataggcaagaatcgggctgaatttaaatcttttcgcttattttgcacttgtcggttgagcctgcgtcatctccaaaaagagtaaaacagggttttatgggtgattttaacgtgtgtaaaagaaaatgctacccaaataacttcaaataaagacaactctatttcaagcggcaaatgagttctacagcttgaatttgaataatacaaacaataggattctcctttaaaaagtcatgaaaaagattcatttacttcattacttattgttgtgctacatggttcttgcggtagctacatcgtgcggcgatgacgaggatgactacgcccccgacaatgtaaatgatcccgagaaactaactgatcctttgcctactaccgaccagttaggcgtaacacacaacaacacgctttattacctttcgttctggagcaaagaagaccatatgatatccgagaacatgataaaccgttacaaggaggcggttccttatgctccgggaaagaagatggaggttggcgacgcgttcttctttacccggcaggacattgaccggattcagtcggataccgatttgctggctgacatcaaggatatgttccataagcggagcatcgtgatgatgatggagggaggaacgaacgaggattttaataccgtctgcacgttgctggattgctataatccttatgcgaaggaagatgagtcttattcggacgaactgccgctgtgggtattttctggaccgcttccgtcggcgagcggattctattccaagctcaatgcgctcagtactgctaccggagctgatggcaaagaatctgtacagacgattaatgaatacgggcagggatttcattgcgacatgacaagtcaaagtttacaaagagccctggaaccgaaagctccgtcaaacggttcgtcggatttgaaaaacttgatatctgcctatatcgttatcggtcaaaatagctataccgcacctcctgttcatggacatgaaggtaaagggacaaccgataattttcaagtagaagctaagatatggaccgcttatagcaaagaccggaaagaacatttttatttggtaaatctgggttttatagcctatgtagaaccttctttttatggagaatggcataccaaggtcagtactctgaaaatgaaagggtatggcttttgcctgactgacgtaaatttggaattcgctccggttcacccgaatggtgccattattcatgcacattccccgcaaactacggaacgccagagctcttataccagcagtgtctctttcgagttaggaggaagtgtcagtgtcactggaccagagatttcaggaggaataagcatttccaatagccatacggaaacaataaatgatattgaagttatcaatagaaccaatccggcccaaggaagcccacagcttaggtggtagtttaatttacgcgaaccttcttcacattttaatatgttttgttacgcgtcgagtgctgtcaatggaggtgctaaggccgggataaccacttgtagcttgtccacagattttattatttctgtacctgatggagctgacaacgaatggaaagtaagcatgtatccaacactgaaaacatatttctttagtgacctttttggattccatgatcaatatgaaacgctatttgatgatgcggcagaaagctggattggcatcgaaaaagtttttaacttgccgactgtcgatctgaaagatgaatgatttgttacgttgatattaataatttctaaagttattggattatgagaaaaacattcttggtgatgagcaggcttatcgatttatttgtggatatcttgcctatagatgagcttgggtttaaacatgtcaaacttcaatcagaagggagaccaccgtataatcctgcaacattactaaaattgtatttatatggttataagcactcaataagatcatcaagaaagttggaacacttcctgtaaagtaaatgtggaattatggtggctattaggaggcttaatgccctcttttcggacaattgcttatttaaaaaaaaataatgcggaggcttttagaaaagtctttaggcagtttgtccttatgctaaaggatatgggtctgatagaaggcgaaaccataggtatagattctttcaagatatttgcccaaaatagtctcaaaaacaattatacacaaaagaagatagacagacatcttgaatatatagataaccgtattgaagaatttgaagtagctttagataagactgataaagaagaagaaaaagaacttcttaaatctaagattaaattacaacaagacaggcgtaagaaatacgaaactcttgatacggaattgaagaatagtaatgatactcaaataagtctaacagacaaagattcaagagcattaatgttaaccaataatgtatcaggagttgaatatgcggttcaagcagcctttgatagtaaacacaaattattggttcactctcatattggagcatcaactgataaaagagaactatcaacagcggcattgaccgtccaggaactactacaattagattcgttcaacacacttagcgatgccggttatactagcggcgaccaactacaagcctgtaaatattcaggaatatgtacttattcatcgcctatgccatcaacatcacctaattcgaattccataccactggctgaatttcattatataaatgacggagattattatatctgcccttgtggagaacaaatgacaacaacagggaaatggagaatccgtcccaattatagatcaaaagtatataaaacatcagcttgtgtaaattgctcaataagagaaaaatgtactcaaaatcaaaatggcagagtaatagaaagaagtgaatatcaagatgtaatagatgaaaataacgccagagttatgaatcatctgttgcaagggcgcgcagcagacattcgtaatgtcgcacaacttccgcctcttcaccgccctgacgggaactgccacagccccccaaaaacagtccaaacaaaaagactaaaacagttgatcgtttcatggtgctgtttgtttaatggttaaattactggtcatgcacacaacggacactaccgcccagcagataatgataaccataatattcattaaaccctgcaggtaacccggccggactatgaatgtcattaccggcaccatgcattaaggcccatctattacgattaaccctatatgtgggcgctgtttttccagctccgatatcaggattccaatatattcctgtatgtaatacagaggcaggagaatgtcgttgaggtgatgaatatatcattggagtttgtgtccagatagctaaaacgccttcttcatatccaccatcgggggcagatatggctggaaaagacttagctattcccgcaccgctttctatcaatcgagtaaatacaacaggataagagcctgttatagactgtatcagattaataacctcccaagccgtagggagtcgccagccatcggggcaggcacgttggggaatactgccataataaatgggtccgaccatagctggtgccaaagaatatgaacgaggacgagcagccatattaggacctccttccctactggcgtctatcatccaacaaacaccaccattacccatacgggtagtctgatagttactgccaccgatacgcataagtttcatggaatttccgaaaccacaagccggttgctggcttacatgcaaacgatattccaattcgttagcagaatttcctgttcgtatggaaaggacagcactacgcatattctgggtaaagttcttactgtttgccgaaatagtaaccgtggctggtactcccgctgtacccgaggtttggctgagtgaaatccatgaaggttttccggttatttgccaattggtattctctgtagttatatttacgggtaatgaagcgacacctatttggatatcaccgtcaaaagcgaacacccgtttgtccaccgtcagccgtttgttccctcgtactattacttcttcttgtacctcgttccacggcacgatacggcatttaagggtatggtttcctttgaaagcttcctcgggagtttgggccggcaacccgtccacactttccacttgtactttatattcatgattacgcagaatatccatcggcactcccgaaccgtagtccttgaagtcgaggcggtagtaaccgtctaccgacggcttagagccggtgagatacggcttcacgtgcataaccagacaaaggtcgtccagcgcattcccgcccgaggggcggttcttgttgtccacctcgcacaggtagaacgtcttttgtgagccgttgaaaataccgatattcccgggtgacacatcgctgttcaatgaggtgaatgtaccccgtgtctgccgtgccccgacgggtacggtgggagtattcacttgcttgcccgtcacattatagttgtccggtgcaatgcgtccttttgcccggtaattgtacagccgcagatcgttgtaataatagaaaaagccttttaggtcggattcaagaggattgataagcgtgaacttagctaccgcacgtatcatcgtcacctcttggggagcgccagagggagagaaaccttcgcccaccgcttggttgggaagctcgccccacatgggtatgccattcgtaaagtcgggtgcggcatccgttccgacatcgaatgccaggcggttcattaccccctctttctgttctccgaatgcagcagcaagggtattcacctgctcacggacattggcaagcaccacgagtgtctgatgttcgggagctcccatcagctgtacacgtacggtttgtgtgccgatatcgtatgtaccctgtgcacggtagaagaatgtacctttctttatattcgtaggatctgcaggatcaaccttgaatgaaagtacatctacagtattgattccattttcatctatagcacgtgtcagcggcgcacgcgtttcggaactttgcgaggtgttcatttcagcagcctgttttgaagcaccggttttaaagttcaggtaaataacggctgtatgtccgttcgcttgcggcaccgactgctccgcatcatcactgcaagcggtcggaaggagcgccgccattgcaatccacagcacagctgaggcatgtcgcctccacagatatgccacacgggtgaaaccggataaaccggaagtctgaaatcctatattcatttttcttctttttttagtaatatatctattttttatatcaactttcttacaaactaaattgcatcggtcatataccgtcttacttatttatcggcgaacagacgaacggaaaacccgtggtgtttaacgtctctgtagttcgcgaacgcagagtacgagtagaaagacacgttccaagcattgccgaggaggctgggaaactccgtgctcgaccaataccgaccatattcgcctcgggcttcgagcaaaccactcgaaatgaacgttgggaaggagatataaccggcagccggaaaaatacgaacgacagccttggaagtatggctatcccaccaagaatcattattgatagtgctaatgtttcctgtaaatgcgctgcccaagtaaacacaatccactttcaatagggaagtaaagtcatggttggcaaacgaacccacgcgggtgtaacggtaagcacaaaccatattattatcagtagcaagagggaaatcggatagggaagaatcatcgataggattaccggtaccttgtttgaaacgcagagcgtaacaaacaccgttacccgaagagaaataatcgttggcgaaagtttttttgatgccaccgaactcaatagcctcgttgacattagaagtattagtaggggaatcatattgggtattaccgctgtaggagaaaacgcccgtcaactcccagcgggaaggcaggtggtaaccataaccgggatgccccagtttaaaaaagacatcatcaaagagcttcttggcatttggattgtaagtatcattattctctcctgtgagcacgtaccaattataataaccggattggtcattgctatggctcgaagcccaatgaagattagggtcagtctgggctgcagtgggagaaatacccggaggaacggaagaaatgaaaggagaattatagatagagccaccggcgaggttatattcggcaacataatccaaaggcgtaccgatctgcttaatattgattttagtataaagtcgtccagcccgtatctacagataaccatccttgaatcccttgccattcgtgatggcctgcaattcctccgtaaccggattggtgagagtggcgccagccgccccactgttttgactgggtttcagccatgaattagaaactgaaattgttgttccgtcggcattataggcaccgaccttccacccactggggtaattggtgcgcacagaaaatttgttctgtgtgcttgtggcatcgtgcttgccttgaagtgtcatcgccgttcgggtcactgccaagaaatgccccgattcattgaacgttatatctgtgaatgcgtctatcacgatgggcactactacgatgttatggttggtaaagttgtccgggctggttacagcctcgttcaaagtggcaaaccccggccctttcacttccttgatggtgaaaatatagcggtggttgcgcagaatgggcatgtatttacccttttcgtaaggactcgtgccaccgcccttgataccgtcccatgtataatccattcagtagtagtattctcttccttgataggcaagatttataactatacaaggacggctgccgccggagatagccgactgttcattcaaataataagtgatgacattcggagatgcggtgtttgcagttccctcaagcgggtgcccgccactgactgctggctgcgatgtggcaggcagtgtgggagtcatgtatcccgactgtgaagcggtggtattgtatgtagcaagatctacccaaacgcgtccgttgcctacggaattgacgaagtaaacctttcccgcagctgtcgtggctcccgaagttgtaggattgatgatatccaccttcgccagcatgcggataagcggtatttcctgcgcaatggtttgcgacacaccggctttcagttcaaagcctcccgccggggcatgctcgccgtacatgggtatgtatgtgcccgtaccttcttgtccgaacctacccacgacttccacttgcttaagagcatcataggtggaaccggctgttatatttgccagttctgtttgggcattagctatgagagctatacgtttgtatctgcccgcaataacgggcacagagaagtatttcgtatccgaagagcctgaaagtgtatgcaacgagctgcccagaatatcatatttcaccttgactttctccgtaccgccttcatcggcaaacatcagtacggtaatctctgttatccctttctcgtctacaccacgagtattcgccgcccggaaatcgggaatcctgacagaaagtgtcacttcggccgtctcacctttgccggacacgggcggaacaggaagaatgagttcgtcttgccggcacgaaagtacgagcggcagtaataacaggaccgacagcaggttgcggaacggtatgatgattgaactacttggcataatatattgttttatgatttgcatttcatgattgaccggtgcgttttttacactcctccgggttttacattctgattttcccaattcctgatcgttattttcgcatgaccgtttgtaaaggtaatctcgataggaatggttacttcaatatcttcctccatcggtatgtggtagcgggcaataagccctgccaacgaaatcgggggcacgatatggtttcccgtggtgggatcgataatttccaccatgccgggggtatcggccttgaaacgggggatgtcagtcgtggcattagcatggtggttggtgacatcatatgctacggcaggctggaatgtcttgttccggcttacggactggagacgccatgtgcccgaggtttcgtcgaacaccggtcgcaaggctgactccatgcccgtgatgtgtaccacaggctgcacgctcacaccatcaaggtgaagacttacacggatagtgccggggctgaaattgacagtatggtctccagtctcgtgctcactgaccgtaagtggcgtgacagcgaaaagaagccgatcaagcgtggggatggaagcggaagtctccgcatgcgggtgtgaggcggaaaggttccttatggtttctccttcggaaaagccgccgagcttggtctgtgcatccgaagcattcgcccagagcacgacagtgtagtttccctgcggcagatacatctcaacaccctgcaaacggtcaagttcactcttctccagcgtctgcatatgctcaatactgccatcgggacggtacacacacagcctcaccctctgaacacgctctccgaaaaggtcagcggcagagccgcgaggcttgtaggtaaatcgtaacagggtatccagagggcagccctccagggactccctgatgcacctcgacaagactaaggttaaaataccggaaagcatcaggaagcgtatagctttatacaatttcatgcgtagtatcttttaggtgaataactgtggttatgactttatatgaatatacgtgttatgatttaacaggttatagaaatacaggtcgtgaggtcagggcaaaagacacccacgacctgcttacattccgccgtgcgagaggaactggtgaactagtaaaatgagctaaaaatctcctctacgcaaacggacttgtaaaagaaacaaacaaatacaatataccttgatggtatgacagttagagattaggcttgacaggaacgaccgtccaggcttttaccgtcaccttcaaccaaacgctgacagcactggtattaggtattgtggaaaggttgctctcgtcaaatgtaaagtcggctttcgagatagtataaatctttcctttttccagttctacaatattgccactgccatctttgaatcctctcacggtgataaactggtcacctgtgccgaaattcacgctgctgccggccttagcagccaaattactcaacttaaatacgagctggagttgctcgttcgcgtcagtactgttaccgttaggaacaacctgatatgcccaacgttgccctgcagttggcggaatgacttcctttgggatacctgtagcagcgacggcagactggtcaaagagttttccagcgttagcaggggtgtaaagcccctgtccttgagcataggcagcaggagtagcaccatattgtactttcgttcccacaacggtaccggccaggttgaacttttcaaagaagttattcacatagattccttccagcgtaaaaccatccaccgcactggaggccgtagtcgccagaccttcgatttcgacacgtgccacggcaggaccgatttccacttcggcatacttgtcaccgtccgttattccaggggcataaggcagggccggactaccggtagtccatgtctgcaggggtttttcatcgccgctcaacaccacatccgcaactgcagactggcttgtgatttccagttgtacagctttcaatgcagctacggttccacctgtaggcaatgaagttccggcaggaatattaccacataccgttacagtggtagccgccgcgggtacatccgttatttgggtaccggtagtcagattcgcaatcgtgatgagagtggttgtagtcgcgttcacatatttcagaatgctggtcccgtcatggaagtatacatgcagattacttaccgtagcaaccgttcccgaggctacaggaggctcggtcgatctcgtcagcgtcggcaactccagcttcatgaatacgcttctcgcttccccgttctttacgtcaggcacttcgatgtcatcgttactgcacgcggtgaatgctgcagccatagcaaccattgtaaacacgcttaacaaactttttttcataatcattgtaattaaattgttaataaaaaaataaacactaataaaacacttgttaatatttaattcgtacttatactttttttcctgttttgttctttctactttttactatttcccttccgctatcctgtccagttccatacggagcccgaagaacttgggaatgaggtccgacagttccggatccaggggaatacgcaggacaagattgggattcatgcggcaggccgcaagcatatgttccactgctaagtaatcatcgccctgccgggcgcttaccacagcatgcaggtattccttgcgggaatctacgggtaactggtctaaaagagcggaagcctctttatgataaccgagctgtgtcaggcaaagggcggtgttatagtcaggccgtttttccaatatcggcaaggcttgccggtattgtcgctctgaaaggagccgcaaggcttcggcatactcttctccctgcggagtatatacgggaccgcttgccgcaagagagtctgtctccgcagaagctatgacatattggtccagagcggaacggtcaaccaggtcgctaagcgaggccacaatgaagagcagcgtgtccgaggcggcaggccgccatgtgctgcggtcggtggcttccacgatagactctagccgcacacggagctttttcattccatcggtgacgggcagagaatatacatagttgtagatataatcatgtccggaaactgaatccgaattctggcggaccatcacggagtcgatataggggaagggaatcatacgccggcggatttcatcacggttacggtcattcatctcattttcggcaatccggtcgtagaaataacggtggcgggagatgtccatcgaatcggtggcggtgaggacatagttgtgtatgttggacaggctgcgcccccccgttataaaggtcacggaatttcgaaggtacacgatcggcggtaagctcgcgttccagccggtacatcggccaaaaggaggccgtacgatgatatttacggtcataggaggcccacaacccgagcgtgtcacgaccagccacatagcgccgtacgctttcttcgatccgcttgcgttccaggcggtgacggagtgtcgcacggttggcctgcgtacgcgtgttccagaaattctggcgttcaagggcaaggcgtttccacttctcgtaggcaagctgacggtcgcgctccttgccgtaaagttcatagaagaacctctgccggcaggcgatatccttattgatgcctttacggtcaagatacacactatcataagccgaaggatcgacaattccattaagaaacagcctgtacgccttatagtccgcttcctgcatgcgggtaaaggaagaaccggaaagcacaacaggtggtagcgggaagcctgaactgtcagaggtgcagagcatcggggtgagtgtgacacgccagcaactgtcaatcaggagggaagggacatggatattgaattccaaacgcacggaaccttcccgcatggtgacctgcttgacgaccgtgcgtgcagcgacgatgtcaacaccgcccaggtgtatggttttccatacgtcatccgtactgtcggagacctcttcgaactcaccgggaagagtgtccgaagaagtggtgaaccccacctgttcggcaagcactccggaaggtgcgctctcctcgtggggaagaaaaatattaggacggccggactgcataaacagccgcatagtccgcggttcgcgggaagtggaacaggacacggccagtaacactcccgcgcagaaagcggcggccgttatgtgggatttgagatacttattcatcattcaactttttatatcttgtttcaacagataagatggtttcagaaaagataaaccagattaacggcggtacgtgtgggtgtcacatagacaccggagcccttgccggtacgcttaccgcagttcacgcaacggtaacgttcccagtcggcccagacaacaccgagacccagttcgaactccagattccagcgacgcgaaagggggcgcaccagccccgcagaaagcccgccgccgaaagctgtgccttcgtaacggtagcgatgtccgaacagaccacccgcattatatatggagaacacaccgtggagcccgataaaacaaccccttccgtaagtttcgcgcatccaataacgcacaccaggctggactgtgaagtttttaagcttgccgtcatcccaaagacggaaaggattgtactgtacgggaagatgggcggaccaatgcgtggaaaaagccatggaaccctccacattcagattccccgtacctaaacccaccagattggttctgacagaataaaactgcgcggaaaccttgtctgaatacacaaggcaggccaagacacaggcaaaacataaaaagtacttttttctattcaaattcataattcaaactaggataactcaaactttaagtggataaacaaaacatgcacccaaagtaaacggatgaaaagctgtgtcatcataataagactgttcttattctacgtgcaacctgtaaaaatgaagtattttaatgaacaagaaacagttttatattatcacatctgttttgtttttcctggttgcaaaagtaataacacataaatcacgagttacaaaatgaaaccacaaatctaacgtccgcattgcataaaacattataatacagaaacataaagacttcgttcttcttatttttctaacacgacgctaacagatgatttacaaccttaaaaaatatagggcaatcaataagtttctgacaattgactggaatagtaacagatattataatgaaagcatcttcatactttccggacatacctcccaggagaattaaacctgttatggcttacctccatgacaaaaccattctacaattacatcattccggtattatggcaaaaacaatctgaacatattctagatttaattaccggatgatgcattagtcattggaacctagtataaagttgaaatacctatcccagaaggcttaagaataattctttattagctgtttccgtagatttaatacgtgatttgagccgtgacttgcgagcgtatacattagccaccgtatccttcatgaataagctaattacttgcggtgaaaatcctacaaaaatatagcataataacctggtgtcggaagctttcatagttggaaaatcttccttgagcttgtacatggcattgtcatgacaagtgtttacgattttttccagttcttgcagtatgccattgttttctgcaaaatctgtaattatctgctttacttcattaaatatgactgactgttgcgatgttgtattttcacgttcatagtaggtctttccaagtttatcgacaatgtcaaagcgtgaagcagccaatcctcttaaataactttccgtagtctgctgttctttcacgcgttcagtaagagccttgtactcggaattggctttctctgtcaataacaaataatggttggtacgatcacgttgcatgcgtaaacgttggcggacgatataccaggcaattccaataataaaaaaggtagcggctgctatagctatttcccagacagtccggtttttcattctgtattgggcgaattttgttcgctctttaaaatagtcccgctcgaccataccggcggagaattgcatgtttgagcgcattattgaatcgttcaagtagatatagcgatgtacattgtccgttgctttttcaaaatttttagcctgcgcttcgatatggtatgcagtgtattgtagttctgccatgtcgcaaatatcagtagtgtgcgcctttgcaagctccagataataccgtgcactgtctatatgattcttcaaaagacttacatctgtcaatgtgtgatatccatataccgtatcctgtcgggcggaaagttcgattcgctgtaacaggtcattggatatatgccgtttggatatcacatatagtgatgcaagattagtaaggctgacttctatcagattactgttattatgttcatcggccaagtcaagagccgccgaatacagccttattgctttttctatatcttttgagtgaaaagtagcggctgccatgtcaagggttgcctttgtctcctcctggatatcacccgattggcggaaattatttctggcttcgtggaaataatgatatgcccggctgtagttcatttgtttataatatacttcaccgatctgtctgtataaaagccctttgtaataagattcatcggtatctgtcagtttcttttctattttgagaaaaagacgtaatgctcccggtttatcacctgtgcgtaatttaattcttccccaataatatagagttttacactggtgacgtaaatctttggggtaatgtttataatattgccaagcctggcggatcaatgaatcgtcagtaactttcatttgttttttttccaaagcttcggaatagagcaatgcatatctggcctgttcagcccggttgccttctggtttgagtttttgtagtattgctaatgcactatccgggttgttctgcattagcttttcagcctcactaaggcgaggggtctgttccctgttataacaacctgtaaaatagagaatagctgatagtccaattataattttatatttcatattgcgaatattaggagtaacaaacacatttcgatgcggaaagcttttattagaagaaatataattattattacattctttgtatctcaacagaaaccataaatactttttttgcatgattccctgcatgatagttctcaattcctatatataccatttccaaaaacagacaataaccaaaaagttataaaatatgcaggcttgggagtttagtattcttcatcttattatcaactttaattatgcgctgctttataccataatgtattttctttcagcacagtcataggattgtcactcggatcggatgttgttataccggaaaatgtattgataggaataatacctttggccatagtgtagaaattttttgtatgggttttatatggaacaagatgatttagctgctctctaaattggtttaataatataggatcgttacagagtgaggttatataatctgcaaaatcataaaatattacaggagtataaccatctaaacgttggattgttcccctcagggatttgtcaaaagaatatttactattgatactttttatgatggctgccatattctccagttctgaacagtccgttactgctaatgtcccacaaggcattatttcataggttgaataaaaattgtaaaattcttcacatcccgattgataatcgggattccccagtaaatattccccaatagcggcataaggcattccgtatgccatcatctcactggtagaaccaatcaaatattttgtaacatcctttaattcataggcaacctctatagatgacatataacagtcatcaaatagaatatattccattttcatgcctgcattagcaataccggaggctagagattttatatctgtttggtattcggcggtcagtcctccaaaataacgtgtcaatggaacaccctgatattcccaatgcattttcatgtgaggtgcggaacgcactttcatctcataaacaggaagccatcccataccgtgacatcctataatcatggtataaacagaagccggagcaaatgcctttacatcatttaaaattgctgttatcccatcgattgtcgtaaaaggcggagacttatattttttaagtatttcacgtttacatctcccgtgagaagacacaatttcaaacatcatggcctccgtactaccggtagaaataaaaacaattactttctcattgttcagccctattttcgttatacatttttccaggtcagatatgttattataaaaatagttcgtcaaatttgaggaccatggcaaatacatgaataatgttttccggttggcttctatcttttgattttcctccttctcgcatgaagaaaaaagtaaaattcctcccaataaaaagataatgctaacctttacgtagatttttttcgttgttttcatcctgcaaattgtccaataactcattattacttttttattatagccttccattgtaaaatctctattttatcttaaatgtgaattgtaaataaccatttcctgatattcatagaatcaaatcctcttataatcttacaatattatgactcattatctcacaatatattgaatattctaataaacagcatgaatttaatcgtttataacacgagatgattttcttttcaatgccctatggcagttctcattggaggcactgccgaatggcacttgtttccgtttcattcttgcaaaaaaagatgaaacggtttaacaggaacaactgcctgttgaaacaataccggcaccaatgtcacaacaggcagttttatggttacttatggcagtccaaaccgattttcaaagccaaatcgctccggcttccacatcccctgacttataagtgtaaattataaactcttcaagcgcttctttccatgtaagattgaaggttcccataattgaatgtatggcacgattacttttttcatcaagcccgtcttcttccaccccttcggggttcgtgtcttcgtctacccccacagtctcttcacggctccagaacaccactaccggaatgtttaggttgatatcccatgtaccacgctggatcaatattccggaaggtttatagaacggatcaaaagtacctgtttccggattgcccttggatttgtagccgtgataaagacgaattttcaggtcgaattccttacggtctttcaaaaaacggataactcctttcaaacctatcgggttactgtctcctgttatttcagcttccttgctatgtttggtcttgtcccagggggtagtgtccacataaagataatccaccaatttctgcggttcattgtcatcggcttccggctgaccgtcaaatgtgggttttacattttcaggcgtgaagaaatgttgatgaatattatcctgcccgttttctataaactggctgttcatcaaatctcctttggcgttatagtaatagatgaacatcaaataaacgggagccggggtgtatttcccataagtatagtagtctccatttttctgcacgtagaacttgctttgactgccttcggcaagcctccaacccttgccggctttcagctcataagttatttcctgaatacgtttcatgtgcttggccggagattccggattctggtgaggtccaccgactttctgtatttcattccagtctgcatgcaggtgacattccacaagacggatagtcattttggaaggatcttcatgcaatttattatctgtctcattttcaggaattacaggatctttactgcatgaattgaacaacaacgaaagagctgttcctatcaggaacatcaatgcgattttacatacaattgttttcattttttatttatttggttaataataattgttataaatcaaaaactccagttcactacacaacgtacatcagatcccatgtcatgtgcatagtagcgtgaacggttagtgtattctttatattctttgttcaagatattgtctgccgctatcatgaattgtagtttgtatccgtattttacaggacactcaaagctagcagcgaaccccaagaggtggtatgccggaggggtatagggaataagatccgtattcgagtcaaaccgggtctgttttgccacgaatcgatgtctgatactcaaacgtaatttggaatgcgatttggtttcgtgaagccatgagaggtcatggctgaaacgggaagaggggatataaggaaggtaatttcctgtcgtctgttcatttgcccgtataaaagaagcaatcaggtgataatcccatgaatttatgggcatgaagtgaaagtcaaaatccattccgcgaaagaaagccggggtctgtttgtattggaatacagggtatacccccgaaataacagtgatggtttctttcttcggttcatcatagatatagccgcttatccattgcaggtaaccgtccattcgggcactgaataccttattgctgtaactgatggaagatatccatttatagctcctttcggagtgcatggtagaatctcctttgacaaacattccggatccgagttcatttccgttgctatataattcatacacgtgaggagctctccaggccagcccgaaattagtggtgagcttccattggtcagagaaatgatgatgacctcccagactgtatgatacgttattgaactttcttgttcctccatagagacttcctgtccagtcataaccactggcacgggtttcctgtccgtcaaaacgaatacctgcttcaattcctcctttactgtaattatacttcccgataccatatattcccatctgtgtctccgtatagttgggaataacgggaacaatacctgttcctgcctgactgtgattatcaatgaacataatttgtcccccaacctctgtttgccatgaattataattcaatttccagcagagagagttttgtaatgagtttaagtgcagggaaacagctggaatgtcggaacccagacgccggatgcggttttcctgtcggtcgtccttctgccaggaactttgccagtaaagatttcctgcgttccgcatactgaacttcattttaccaatggctgtctgatgggtaactttttgatatgggtatgcgatacttcgcgtgaaaggatctgtgtacaggggacgtcccaatcggatacgttctgccagcagatcttcacttcccatctgggcactgaacattactcccgtccggttgtaaaagtgactgtagaatccttctattcttaaacgtccacggtcatagccgagtaaagcggaggtatgatgttctctggctccagtgttatttagaagatagtttgcggtggaacggtctccggaatttgaatatgtcccctgtactcgccaggcaaggtcacggagaaaagggaaagtgccttccaactgtccggtcagcacataacggtgaccattacttccataaagtatggaagtctttcctttcaaggccttcttccggaagggtaagggagcctgttccatgacaataattcctcccaaagcttctgaaccatatcgtaccgcgtcagaaccttttatcacccgaatggaagcgtttccgttcatatccacttcaggagcatgatcaactccccattgttggcctgtctggcgggaaccattgtttatgattaatatccggttgccatacattccttggatgacaggtttggcaactgtcgtccccgtactgatggaacttacgccactgacctgttcaagcagagaggtgagagaagttcccaatgcgcgattgattgcgaaggaagtaaggttgttgcttaccgtattccgagtcactccggagcactcaccggtaataatgacttcttccagaatttttatctccggataaagatatactgtttgaatattcacctttttgaatgcctcactcaaatatatatattgagatttgtagcccaaactctgtacaagaactgtatccttggaatttgtcttccaagggataatgattcttcctccggttgaactggcaaggggttgattctccaataagatgtaagctccttcaatcggacgtccggtttccttatctacaaccaacagtgtcctatgtgtatctgattgctgtcggtatttctgtgcatacatccttgtaggagatattgcacacagccagacaatgaatagacacacatattggaaatatgcatgaaatgtcatactttacgaaaattgtaatgaagttataaattgtttaagataaccaaagggcacagcatccctctttcacatgtcatcttataatgcatgcaacccatgagagggattgtaatagttggacaggaggagcgcggagagacaataggggaaaagtaacagtaatgtccttctccttttggataagatattcaacggggttctctgtctgaacgcaattgtactcaaagctctcggcttcggtaaatgaagataaagtgaacaggcagatagcacatttatcggcagaatcatgatgggaagattgttgctcatcatgagatatacataaatcttctttgtgaacatgaaaggctttcacaaagaagaaaggcatcatagtcagcaacaataagcatgccactatggctctgtatttccgcttttttcttgcattatccattagattgtaaagatagcagattgcataattgtacgcaatacctataaatgatgattttacgatcaagtacgattaaatatattgtcccgattattttgatatgggaatcaaataaatcgacacatcgttaccggctgtatgataacaggctataataaatcttcctatttttattcctgttcatattggagggcctgtgtaagatgccccctaaaaccaaaatgattcttctcccagaaaatattcagtaatgatctcttgataagttttgaccgatgagcattattattttaaaatcaagtacttcgattctcatataattgtttttaaattcgtttaaaattgaacggtgtccaattgttacgataatacttcagttcacgttgatatttcgaggacgcaaagtacggctcattcccaaagcataagagaaaggattgatgtcgaaatcgcgttcaaatgttccggttaccatattctttctttgcggaagtgtacctggaaagttttggttacgccaatttccttgtacagatatgccagcttttatcttgtcttcattccaatagaaagatttttttatatttattggtcgagagaggctactactaccctcctgaagttagtaaacggaatcattttttacttcctctttttttcttattgttgtgcattaataaataaagctcttgcaagaaaaaaaaggaatatttttgtcttagatatcattgtgaatttcaatttaaatataaacacaatattggaccggatcaatttgtcacaaatcattttataacgaagaaggtatgtgtatggacatattaaaaagaatagcgtcactcgtcaataccaaatcattagcaccaatcatttgaaaaacaatatacaaaaaacgctttccgccaatctcctttaattgggcggagttaagttcaaatcttacattatccaaatatatatcctttacagaagaaaagagaccattcaagacgttcttgctccatttattcttttcccattgcaatgaatcatgatccttaattacaaattccacatactgtatccatctatctatagaattggaaaacttatttttcacatcaccataattactattcttaagtttatttttcacaaactcatgcaaatccggtgttgagtaggctatcaactcattcttcaattcacttaagggtttaaaaccggtgaatattttatcaaattctgcaagcaacaagccaccattaccctttgcatacatgcttaaatgtagtgtaagcatgttgcctgtgtcgcttttttctttcagagttgtactgatttccacagcatacgcactttcatcatatgaaaaaatgtgaccattaaatagagatggattttcatatatccctctcatatacttctgttttataaaatctgtatttacagtaacctttccttcataatatttattcttgtcaaacagaagtgatattctttttttagacctactattattgtacctaagatagaaagaaagctgattttgctcatattttatatcttcaagaaccgtcttctcaagatcttccagagtaaaaagatatttttctccccctacatttatagaataaaagtccactaaccggcctaaattctcaattgtaaacatgttcactttatgtaatctgtaaaagctatcaaaatcaagctttgcataataatcagcatttgctttccactcagcttgtgcaccattaaccatttgataatcgtcaggtttgctcacaaagccggtaaaagtgaattcattcttaaaaggtgaaccatttaccgtgcctgtaacatatagcacaaatgagcctttttgataatctttccttttcactacagcctcagttatttttatcattttcccgtttatctgcagcgtctctttctgtgcttcaacaagtcctaacgcaacatttatatctctagacatatcaaatctaaaataagctgcaacatcctctttagccacagcgggaactgatccggattgttcactatgagattcttcctgttgcctgggatgtcgattccgggattcaatcggatcattctcaccacaagcaactaataacattatacagacaagaaataataggcacctttttatgttaaaatttcctaccttaaacaaatcacatgtcctatcacacataaacattactgtcttttcaatatatattgtgctgcgagccgcccgctattgttgaagatttccgtactgtcagacaagaccactgcgtcgtcgagaactttataatatgttttggcacccgatgaaggagtaaccagttcaatgatgttttcgcctatcatattatatacaccgctctcttcaaaaataccattctcctcacccagatactcactccgcaaatcataagttgcatcactattaattttcaatgtcgttttgatgccaccacagtcggcacaaggtaatatgccttcataggtgccataacaatctttgtttttgctatccactactccggcagcactattttcttgttgtttatatttcttcccagatccaacacagcctgatgttactattatcatggctgctaccaataaatgcaatttaatcaatttcataatttaaaatatttaacatataatttgaggttaattataactcgcaagatcattatatacaaagacttattgtaaatgcatagcagtatataacgaaattatcttcgtctcactcgctatgcattacaataaaattagaaaaaaaagaaaactatttaaccgtcacattgatagttcccgttttcttatccttatctgtaactgtaatagtagtttttcctgccttaactcctcttatgttgactttattttccttgactgataccgtagcaatattgacatctttcgcaacggcagaatatggctgtgcaccaccttttactgttactataccatcttttccaacactcacagtaatagattgtttatcaaaatccagtccttttggagtttttggggtctcttttacagttcttacagttacagcaacttttcctgtaactcccttccggtccgtaatagttatcattgctgaaccatcttttacaccggtaattacaatcgcatttttatctgatttcgcaactgcgatttttgcatcacttgatttcgtcgtatatggtgcagtaccattactaacagacacagtaaccgttttaccaactgcaacttctactttattaggactgatttttaaattgggcttatcatcatccttatcacatgataccaatacaaaagaagttaagcaacaaatcactaatgccatcgattttaaaaaaggtttagttttcatttttgataaatttaaattaatagataaaatgctaatgagtactcataaataaaaaagtcagatttttcttactttttctttgccagcaaaaataataaagcgaaattgtatttgaattataaaatgattttaaaaatctaacacctcaattcatatacatctaacaatcaacaccttagtgttatgaaacattattttatctcacattgaactaacatctgttcgaaaagcataaaaaaacaatattattccaatatcaaacttaaaaaaatatgtttcacattgctaattctgattatatggtcaatcttcataatagagtgatacactattataacaccgactgttacagtatccctaacagtgtttgaaaaagaccctttttatgatatttcacaaataccatatattccctataatattattcttaattagtgaatgagccattcaaagtaaaaattgaatgtatttttagcatattctataaaaatcaagaaaggatggccaattcaaaaagtattttatccaacaaacggaacattctttttacaagttgaaggtggtatcactcaactataattgtggatgatcaaaaacgtgtgttcaaaccatacacaataaatcttctatagcacaagatttcttgaacagcaagagataggtactcgcaagtccacgacaaaacgttttccgaggggatactgacgaacttaaggatattgaaatgaggtaccatacaaaagtcggttgttgtcaccaatattatcttaaaataactcatctacaaaagctatgtgttgtgacatcgtattgttaaaaaaacattgtcataaacgtctgacgtctcttgatagatttacttttagagggtatcatatagctatcttccatatcgtttcgagtcgctttctgtactcatttgatatcattcaggccatactcttgaacattcactcatgcaataggggcacttaagttctaataaatagattatctcgctagcagtctcatctctcaccacacagctagatttattataaagttaaattcaatgctcgtgcaaacggctgtttgttctgatttaatgtactcttactctttgtttgaaggcacaaagatataatgagtatctaatattcaaataaactttgttttaagactttttatgacacaaacaaatacgaatgatttgaaaaataaattgattctctttcataagatgttctttcctataagttaataaaaaaaacactttatataattttttttctcttcattttttcgaaaagccccagtcttccattttttatagaatatcatttacatattcctattttttccatccatgcattatatacctcatttttaggtgaagttcacccactctctcctcttattttagtcagattatgctgccgttctttttttttcttcgtgaccttttcaatcatacataccgcattgaacgtatgtactccaaagaaaatccaaaatatttccacttccctgtttctggctttttattctggtctgtaaataatattatttctacattttaaaacttcctttcaatctggtagcactttcatggctgagttctgaccatcaaatcttacgaaatggagcaatttagatagctcagaccttgtacttaaagaagtgttttgtaaaactttttaaattgatattattagtgtagcttgaatccgcagcaagtaccttaatcctaactttgatcagttgttgtaaatgaatacagtctttcaaatgtattacttcgttaaaagccgtaaaggagatatgttctataaaggagatttcatctatctgtatactgttgactttgcctccgaattaaacggatttgttttttcttgccttaataatagtctggagggactaaatattaaggaaatttgctaattactgacgaatcacattaacgatttaggattggttagtgaatgaagaggggcaatctgaacaccactaaataactggtaacgaatattactagttaaatatttaatcagttatgaatatgaaaagttgatataggacttcaagactaccaaggccattttattttcaggagaaaaaaataacttttaccccccccaaaaaaaaaggagaggatgtcaagcatctgttgggttattcccaagaaagtgaacagagtatggaagctgctgatttattcgttacaactttgacgataatttttaagcatatcgagcggtgtaaaatctacctaaacaaaacacgatttcttttatatctttatcgtgtatttttattttagattttcatcggttggatttaaccgattgaagaataaacttttagcagagtatttgagaaatagaggtaacgaattagcaaccgtgcaaatttcagcgatttgcggtgctatgttgtcaaataactctttgtaaatacaaataaaatatttagtacaattttgaagacatcattaataaccttatttatatccatacacctttggtttgtttccctatatttattgataatcttttattcacatatttggtaaatatttcaatctacgtagattttataactaatagagtataaacaatacaagctattccaacaaataaagctacggcagagcatttggtaaatattgtatctttatttttaataccatacataagcccaataatagcacataaaggaataccgacaggaataatcgtcagaaaccaaatgagtattttatgatacccattgctgttaatactttgtttttcaaattactcatagctaccattctcattgcttgttactcttcgcatctctttctttattcatcaaccgccaaatagctttctgatatttcaacttggcgaacatctcgtcatcttggttatctatctttaaggtcattacccgaatacttggggcagtgggatatcggcttctcactatatcatccactagaaacccgcatagtccggtagccggttctgtaaacaagaaaccttgaaacatgagattaatatagtctgcattttcgcaaagatacgccttgtacctcttatatgtatccaacttcatataatcttctgcacggctgctgaaatttggcttggcaatttcttcgcataaggcagattctaatttgctgtaggtggcagtatctaaatctccccaccaataatgatcttcgggattgaccgacatatccacccattcagaagcctcccagtagtctatcgcaaacacaattgaatcggctttctctttggatgagtaatagatggaatctttctcccaacctttgaatatactttcaatagaatctattttctctttcctaattttattatatatgttttttaaatcgtagccatgaggtaacgatatttgaaaaacaccgttttcaattcttgcattcacctttggatttgtgattaccgtatcgtcaagtacaaaagctatatgtttgccaattgccttttctgtttcttttgcccatttttttagtttatgcttgcttatttgccccacaattacgcatgtcccattttcatcagaatccattcgtaacgaaacaaaatcttttactgttacaatagactctttagcaatactgtctttttgctgtgataggatgtgataccatccattctcatagtgggttttatgtatttgattacaggaagcgaaataagcaattaaaataagtattccgaataaattctttttttgcatgttcttatataaccttaattccgcaacactattataaattaaactttttaagtacctgagcaacaaaaagttgctcaggattttgccatgtcagaattttcacttatcttagtgttgcaaaaaaaacaagagaatccgacgatagacatggcgaagatacaaattaaatctgagagactcactccttttgggggattattttcaatcatggagcaatttgactccacattatcatctgtaatcgactcaaccctcggtctaaggtgtagatcgttcggttatcagtacagcgaaatcatccgttctctcatgagtatctacttctgtagcggttcatgtattgaggatgtcactactcatttgatgaaccacctctcgcttcatccgacacttcgcacttgtagctctgatactatcctcagggcgataaaggagttgacgcaagaaaacatttcatacacatcagatatgggcaagacctacgatttcaatacggctgacactctcaatactttattgctcaattgtatatttgcatctggccaactgaaagagggtgagatgtatgatgttgatttcgaccatcagttcatagagacagagaagtatgatgcaaagcctacatacaagaagttccttggttatcgccctggcgtggcggttattggcgatttgatagtcggtatagagaatagcgatggtaacacaaatgttcgtttccatcagaaggacacgctgaagaggttctttgcgagatttgaacagaatgggctcactatcaatcgcttcagagctgattgtggatcatgttccgaggaaatcgtggaggaaatagaaaaacactgcaagtccttctatatccgtgctaaccgctgcagttcgatctacaatgacacctttgctctcaaaggctggaaaactgaggaaatcaatggcattgagtttgaattgaactctatccttgttgagaagtggaaaggtaaggcatatcgacttgtgattcaaagacagaaacggatggatggtgtgcaggatttttgggaaggagaatacacataccgttgtatcctgactaacgactatgattcttccgtaagagaaattgtcgagttctataaccttcgtggaggaaaggaacgtatcttcgatgatatgaacaatggtttcgggtgggacagattgcccaaatccttcatggcagagaacacagtgttccttcttcttacagcacttatccgtaacttttacaaggccattattcaaagacttgacgtaaagaagttcgggctcaatgcaacaagtcgcataaaagcgtttgtcttcaggtttatctctgtaccagccaagtggatcaggacatcaaggcggtatgtgctgaacatctatacctgtaataatgcttacgcagatgttttccagactgattttggataatgcctacaacttatgggaatgatattgtgtattgcctcaagtcacattgtggggtaaggggatattgtaggcagaagtgggtgcttcaagttcaaattatctgcaaattcagtaatgagaggacgtgtaaacgcaataaggacgttcaagggcttagttgcggatttgaggttataataaaaaaaaaaactgttatctgttcctgaattgtatccgtcagatatatttaaagcattatgtttcaaattagctacttctccaaatatataagcaaaagtagattgtttgcctttttaagaagactgttcaaatctgttttgatattgtttttcttgatcacaacttataagatggattgtgtatagttatttcatctcgccaagcatattccttgttttatccatataattactgaaatgcgcctttacctgtcaaaaatatattaccgtaaataatgtaccgttttatcccaaaagatttaaaaacagttctttatttactatttttgcagatttgatacgtgatttgagccgtgattttcgagcatatacgttagccaccgtatccttcatgaataagctaattacttgtggtgagaatcctacaaaaatatagcataacagcctggtgtcagaagttttcatggtcggaaaatcttccttgagcttgtacatggcattgtcatgacaagtgtttacgattttttccaattcttgcagtatttcattgctttctgcaaaatctgtaattatctgctttacttcattaaatatgactgactgttgcgatgttgtattttcacgttcatagtaggtctttccaagtttatcgacaatgtcaaagcgtgaagcagccaatcctcttaaataactttccgtagtctgctgttctttcacgcgttcagtaagagccttgtactcggaattggctttctctgtcaataacaaataatggttggtacgatcacgttgcatgcgtaaacgttggcggacgatataccaggcaattccaataataaaaaaggtagcggctgctatagctatttcccagacagtccggtttttcattctgtattgggcgaattttgttcgctctttaaaatagtcccgctcgaccataccggcggagaattgcatgtttgagcgcattattgaatcgttcaagtagatatagcgatgtacattgtccgttgctttttcaaaatttttagcctgcgcttcgatatggtatgcagtgtattgtagttctgccatgtcgcaaatatcagtagtgtgcgcctttgcaagctccagataataccgtgcactgtctatatgattcttcaaaagacttacatctgtcaatgtgtgatatccatataccgtatcctgtcgggcggaaagttcgattcgctgtaacaggtcattggatatatgccgtttggatatcacatatagtgatgcaagattagtaaggctgacttctatcagattactgttattatgttcatcggccaagtcaagagccgccgaatacagccttattgctttttctatatcttttgagtgaaaagtagcggctgccatgtcaagggttgcctttgtctcctcctggatatcacccgattggcggaaattatttctggcttcgtggaaataatgatatgcccggctgtagttcatttgtttataatatacttcaccgatctgtctgtataaaagccctttgtaataagattcatcggtatctgtcagtttctcttctattttgagaaaaagacgtaatgctcccggtttatcacctgtgcgtaatttaattcttccccaataatatagagttttacactggtgacgtaaatctttggggtaatgtttataatattgccaagcctggcggatcaatgaatcgtcagtaactttcatttgttttttttccaaagcttcggaatagagcaatgcatatctggcctgttcagcccggttgccttctggtttgagtttttgtagtattgctaatgcactatccgggttgttctgcattagcttttcagcctcactaaggcgaggggtctgttccctgttataacaacctgtaaaatagagaatagctgatagtccaattataatcttacatttcatattgcgaatataataatgtgttttattttttgcatgggcgattaggaatattttaccaatataaattattctttaacttatatgattatcgctcgctatttatatatattttttattgggcctaacaatatataattgcttattagcatattatataatatgtataatcgtaatagtacaaaatagcagtaagttattgctattcagagtaaaagtatcagttcactcgttgttgttaaaaaataaacttgactaccctaaaggtgtaagtgtaagtgcttttttgaattttatcaagggtgttagatatgtgttagattattaattgaaccatttttgcaaactactgattataagtaaaataaaaatcaatgtattagatttattcttttgtcctacaactaaaaagctctgcaatctttttacttttgcattcgaaaaaaataaaacaatagattatgaagaaaattgctattttattagtttttactttgggaacatttattgtaaatgcccaatcagttgtagaaggaacaaagtttatggacaattggtctgtaggagtgaatgcaggagcagttacccctctcactcacgcctctttctttaaagggatgcgtcccggtttcggagttggaatatccaaacaattaactcctagttttcggtttggaatttcagggaatgggatatatcaatacaactccgagtaaaacagcttttgatgttttagatgtcagcttgttaagtaaaattaacttaataaatctatttgcaagctatcggggcaaacctcgtttgtttgagatagaagctattgccggaatggggtggttgcattattatgtaaatggtaaaggagatgacaattcatggtctacccgtctcggattgaatcttaatttcaacctcggtgaaacaaaagcatggacattgggaattaagcccgctatcgtatatgatatgcaaggtgattttaatcaggcaaagagttgtttcaatgcaaacaatgcaacatttgaactgactgccggattgacttatcacttcaagatgagtactgggaatcattactttactaaagtaaaagtctacaatcagagcgaaattgatgatttgaatgttgctattaatgcacttcgcgaacaggtgggcagtcgtgacagagaactaaacaatgctaaccaaagaattagcggtttgcataaagagttggaagaatgtcgtacaaaggtcgttcccattgaaacagtagtcaagactgcccgcgttccggaatctatcattactttcagacaaggtcgctcatcagtggatgcatcacagctaccgaatgtggaacgtgtagcctcctacatgaagaaatatcccgattcaaaagtcattattaaagggtacgcttctccagaaggcaatgttgagatcaacgcaaaaattgctaccgcacgtgcagaagctgtaaaaacaatccttgttaataaatacaagattaatacgtctcgtattactgccgaagatcagggagtaggtgacatgtttaccgaaccggattggaaccgtgtaagtgtatgtactatcgaagattgatgtaataagaatatttggagttgttgaaggtaaataaaaaaggaagcccgaaatctgagggcactgaaaaagttctttttctccgttagctcctcttcttatgaattggctccaaagttgcatggcgtatgataaatttcatttgcatgcaacttttccttatattggtagtgagtaatcgtctattggtatacatgcacgctggcaacgacactctcaaaggagactttgaaagaatgcaacttcagtccgcttttcccatctgctccgactacggctcggaggctatcgtccttctgatctttgaccaaaagaacttcttggtctttgatttttttgctcatattactatgtatttaatgacgtcagtagcggtttacagacaaaagtaaacaaaaaaaagtgagtgctagagattgtaaataagtgagtatttgtagctttgatatgattaggagtagcatattgaaagttataaatttcatttgctgaattaccataaatggggaatggtaagtaaaaaaatcatcattttaaggtattgcaaccgaaaaaatatgtgactaattttgcgttataaaataaagaattatgttctgacctatgcaaacaacgaaggattatatacgtaagctattgctggaaacagcgcagaaagcttttttcgaaaagggcttcaagtcggtgtctatgcgtgagatttctaagttgtcgggcattggtctgagcaatatatacaattactatccctgtaaggacgatttactggttgatgtgttgcgtcctcttttggctgctatgtacaggatgctggaagatcacaaccgaccggagaatttctcccttgacatatttatctcagatgaatatcatcgtgcatctttgcaggagcttatgggcattataactcgttaccgaagtgaattaaatttgctgtttttctctacgcagcattctcgcctcaaagattatttggaagagtggattgagaagagtgccacaatagggatggaatatatggaaaagatgagaagactccatccggaactacataccgatatttctccgttcttcatgcacttcacctgctcttggtggattaatatgatgaaagaggtggtgcaacataaggaactttcctgcgaagagatagagtgtttcatcagtgagtatattcgctttagcacgggaggatggaagaaactcatgaatgtaaagaatgaaagatgaaggcagaactattgaaacatcctgtctgtcaagagataactaatcaaaacatccgtttctcgtcttgtctgcaatgcaagccttgcggaaatgattgtacgattgtaaacaatcgaatctcttttgtatttgattccgagacaataggcatcagctaccttctgctcgactccacacctatagcctgcatggacagatgctgcaatcttgtcaggcagcgtttcgtttgatgcaggagttggaacgccgagtcattccagaagaatcactaaataataatcagcatatgagtatcatcaacatcatcagcaacgacgaattaacactcgtacaaggagtcaacgggcttttcttctgcgaggagtcatgggttacgcaaagcagggcagtctcccgtatcggaaaggttttgcccaaagaaattattgggacgaaagatcaaagtaccaacatcgtacatccgcagactgaccgaactaaacttagttgccaaaagcatgaaacgtcttatttctaaatctaactgtttctcctaccgagcgagccgcctgcaaagagcggctcgctttgcttctgaacaaaacaaacttttgttctcttttgacgcactaacttccaatccatcatagccatgtctcaaccagtacttatagcatttttcctaacatcgtttgccggtatatccacagggataggcagtgcgattgcattttttgctaagcgcaccaatacttcattcctttctctttcattgggattttcaacagcagtaatgatttatatgtctttcgccaatctgtttgcctcttctttgcagactcttgccaatatacatggcaaggacgacggaactcttcattccacactttcttttttcgggggaatcgtattgattctacttattgataagctaattcctcactacgaaaatccacacgaaatgcatcgggtggaagaaatgagcttaaaggaagaacgaaagactgaaataaagcctcaattattacgcgtcgatgtagtgacagccttggtgctggcaatacacaatttcccggaaggtatggttacgtttcttgcagcattgaaggatataaacattgctatacctattgcctgtgccatcgccatacataatatacccgaaggcatttccgtctccgttccgatctattatgctacaggtaatcgtaaacgggccctttggctttcatttctatcgggattggccgagccggtaggagccgtcatcggctatcttatcttggcaccattcctcaatgaccatgttttcggcgttattttcgggatgattgccggtatcatggtatttatctcgcttgatgagttactacccgctgccgaagaatacggtaagcaccatcatactatctatggtttggtagcaggcatggcggttatggcactcaacctgctgatgttgtgttagcaagactaagtaatataaaaaacataagtaaaaaaaagaaagaatatgaacacttctcactcctgccgttgtcacgtgcatgatgcccacaaagagcattcttgtgtccacgcacattgtcaccattatcatatgtagccccaaagtggaaagctatttctcgtcacgctgctgaatgtgttgaaatgaatgaacttaccaataacaaacgatatgaaaatagaaagaatcaatgactggtttgcccgtcagggcagatggatggtacaaaaacgatggcttgtactaagcttgtttatcctcgtcttcgccataggatttacagggttaagatatttcaaggtgagtgcttcgtgggaaaactacttcctcgaagacgacccgatgcttgtcaagaccaaagaattcaaggatatattcggcaatgacaattttgccgccgtactgacccaatgcgacaattcgtttatgaaagagaacttagagctcatccgcgaactcacgaacgaaatgatggatagcatttcatacgccgacaaaatcacttcgctcactgacatcgaatttatggtagggaatgaagaaggaatgactatcgagcagatagtgcctgaccttattcccactgatgcggcaagtctggaaacgatacgtcgcaaagcctatatgaagccacatattgccgagcggcttgtctccaaagatggtacgctctcgtggattattctcaagttgcgtacctttcctaaagattcagtgtggaataaaggtaagaatgccgtttctcctgaagtgctaacggggaatgagctggagcatatcatcactaaagacaaataccaaaagctccatcccaaaggcacaggcttgccctacgttaccgccatgaagatgaaatggattggcaaagagatgccccgtgtgatgggcattgccgcactcgtttccattcttattttgttactcataacacgctccctacggggcgttgtcgttccacttatcacggcggcaggcccaattgtgattgtgtatggactgttgggatatgtcggcatgacgatagacagcggtatgatgatgatacctatgctgttggcgtttgccgtctcgatagcctataacatacatatcttttcctatttcaaacggcaattccttctacacggagaacgtcgacgagccgtagaagagaccgtgggtgaaatgggctggcctgtgttgttcagtgcactcaccacctttgccgccctgctgtcgtttctcgctattccgatgcagcccatgcggttcattggtatcgctacctcctcgtgcgtgatgctggctttcttcattgccattacactgatgcccgtgctgttgagttttggcaagaacggcaaacctcatcccaaagtgcaggaaaccggcggacggtggctcgaccatcaactggggcgtttgggagaaagcgtactccggcatggcacattgatcctatggattgcagggctgcttaccgcagcactcatttatcaattcaccaagatagagaccgcctttgacatagaacgcaccatgggacgtaaaatagcctatgtaaacaatctgctggaagtaggtgaaagcgaactgggatccatctacacctacgacgtcatgatagacctgcccgaagacggcttgacaaaatcgccggcaatgcttgtacgcttagactctctggcacaaaaggccgaaggctataagctaaccaagcgaacgactacagtgctgaatatcctaaaagacctgaatcaaaccctgcacgaaggagatgcggcttattatcgtattccgacgaatccggaagaggtggcacaactgctgctcctttacgagaatgcaggcggtagcgaagcggaatattggatcgattacgactatcgacgtttgcgcctgatggtggagatcagcagttttgactccggcgaggtagaacgagagttgaacgatattgcagccaatgccgccaggctcttccccgaagcttctgtcactacagtgggtagtattccgcaatttaccgtgatgatgcagtacgtggctcgcgggcagatggtttcatttgccatctctctccttattatcggcatcctaatgatgttggtctttggcagtgtacgcatcgggcttatcggtttgatacccaatatcactccggctttggtggtcggcggactgatgggatggctgggctacccgttggatatgatgaccgcaaccattatgccgatgatcctcggtttggctgtcgacgacaccattcacttcatcaaccacgggcatttggagttcgaccgtcgaggtaattatcgggatgccattctccgctcgttccgtacgatcgggacaccaatcattctgaccagtgtcgtgatatgtgcgaacttcgctatttacatgacttccgaaggcctctcttttatacacatgggtctgctctccgtagcgggtatcgtatcggcactcgtggccgacctctgcgttacacccgtgttattccaaaagttccggttattcgggaaagagatagaaaccaatgaaacaatcaattaatatgaatacattaaagaaacttcaattttacatgggcaaacgcaaggtgcttatgcccatagccctgacactgtcgggattaagcggtctgctctcgcttatgccattcatcttcatttggcttatcgtacgctcgctactattgactggcagcgttgcctcaggaatccctatcaacgtctatgcatggtgggcggtaggcacagccgttgccggccttgtcatttactttgccgggctgatgcttttgcacttagcggcgttccgggtagaaaccaatatgcgacgtacggctatgagaaaaatcatgcagatgccgcttggcttcttcgaccggaataccagcggacagatgcgtaagattattgatgaaaatgcttctgaaacccacacgtttgtcgcacatctcttgcccgacctggcggggagttttatagccccgctgtcggttataatattgatcttcgtcttcaactggcaacttggtctggcgtgcctgatccccctcacggcggctgtcttcatcatgacacggatgaatacaactgctcagaaggcgttccaaaatgaatacctcggagcacaagagcatatgagcagcgaagcggtggaatacgtacgtggtatttcggtggtgaaagtgttccagcaaacgatattctctttcaaacgtttttacgacagcatcatcgcctaccgggatttagttaccaaatacacgctgggttggcaaaagccgatgtcactctacacggtggccatcaatagctttgctttcctacttgtccccgtagtcatattgcttatcggcaacaaaagcgaaaacattgcccccatcatcaccgatatgttcctgtatgtgctgattactccggtgatagcaaccaatgtgatgaaagtgatgtatctgcaacaagatatgtttctggcagatcaagccataagccgggtggaaaacctgacgagtagcgaaccactcccaatagccgaaaatccggagaaaatcaccgcttgcgatgtgacattcgagaacgtttcgtttgcctatcccaatgccggtcaaaatgccgtagacggtatcagcttccacctccccgaagggaagacttttgcccttgtggggcaatcgggaggagggaagaccaccattgcccaactcattccccgcttttgggacgtatcagcaggtagtgtgacgattggcggaataaatgtgaaaaacattgccaaagacaacctgatgaaccacatcgctttcgtcttccagaatacaaaactcttcaagacctctttgctggagaacatcaaatacggtaatccggcagcgagtgatgaagccgtgcaacgtgccatagacctttcccaaagtcgggagatcatcgaccggctacccaacggattgaacacgaagataggagtagatggaacattcctttcgggaggggaacagcaacgcattgtcttggcccgggccatcttgaaagatgcgccgattgttgtcctggacgaagcaacagcttttgccgaccccgaaaacgaacacctgatacaaaaagccctgcacgagctgagaaaaggaaagacagtgttgatgatcgcccatcatctgactagcgtacaggatgccgacaagatactggtgatagcacaaggcaagattgccgaagaaggcacacacagcgagttgatagcccgaaacggcatctataacagcatgtggaatgaatatcaacgaaccgtgacatggacggtataaacctcaggagacaacattatgaatattagtaaatattttcaacacagattcaccttatcggaagacggggcaaagacctttataaaaggggttatagcttctctttttctcaacctggcactgatgctgccggtaatcttcatctttctgttcatcaccgattacctgcaccctgttatccaagccgggaacagcacgacgcacgggctctggtactacgtgctgacggctctctgttttatgacggtactctttgtgattgcgatgatacagtacaagagcacctacacgaaaatctataccgagagtgccaaccgtcgtattggcattgccgagaagctgcgtaaattgcctttggctttcttcggagaaaagaatctttcggatctcaccgctacgatgatggaggattgtaacatgttggaaaccctcttctctcacacagttccacaactcttcgcctctgtcatcagcattatcttgattgccaccgggatgttcttctacaactggcaactggcccttgctctctttggggtcgtaccggtagcgacaacggtcatcttcttaggaaaaaggcttatggataaagctaataaggagtactatcacgtaaggcgtgatacgaccgagcagatacaggaagggcttgaagcggcgcaggagattaaatcgtacaacggagaggcagcctattgcgaccgtttagacaaacagctcgagatatatgaagccactctgcagcgaggcgaatttctcggagcggggcttgtgggcagtgcacagtctatcctgaaacttggtttggcaagcgttatcattgcgggagcttatttacttggtttgggcagcatcgacatgttcacttacttggtcttcctgctcgttgtagccagcatctacaaccccatcatggacgtgttcaaccatatggcgacactgatactactcgatgtgcgtatcgaccgcatacgtgagatgaacgacatgcccgcacagcaaggcgatgaggattgcacggtagagggttacgacatctgttttgacaaggtcgattttgcttacgagacaagcaagcaggtgctgcgcaacgtctctttcactgccaagcaaggcaaagtaacggcacttgtgggaccttcggggggaggcaaaagcacttcggcaaaattagctgcccgcttttgggatattcatggcggaaagatcacacttggcggacgggacatctcaaaaatagatcccgaaatgctcttgaaaaactatgccgtagtctttcaggacgtgttgcttttcaacgcttccgtcatggacaacatcaaaatcgggaagaaagacgctaccgaggaagaggtgaaagcggtagcacgtcttgcccgttgcgatgagttcatcgcccggctgcccaacggttacgacaccttgataggcgaaaacggagaatcgctatcgggaggcgaacgccaacgcatatccattgcccgtgcgcttctcaaagatgctcctgtcatcctcttggacgaagcaacggcaagtctggacgtagagaacgaaacgttgatacaggccggtatatcggagttgatcaagaacaagaccgtcgtcatcatcgcacaccgtatgcgcaccgttgccaacgctcatcatatcgtggtgctgaaagacggaaccgtcgcagaacaaggagcacccgacgaactgcttgcccgaaacggcgaatttgcccgcatggtagcacggcagaaggagaccggaatataaatcgaatcaatcagaatcaattataaagaaaaaggacaaatgaagagatcaatcgcagtagtagccatgcttgtggtggggttcgctgccacaacatgcgcacaaacgggcagagagattgcccaaaaggtaaaagaccgtcccgacggcgatacccgtcggtctgaaatggttatgacgttaatcaacaaacgcggagcggtgcgcgaacgcaagctcatttcctactccatcgatgtgggcaaagaaaagaaagaccgcaagagcatcatgttcttccaatatcccggcgatgtaaaggggacgggcttcttgacgtgggattatgatgagctaaacaaggacgatgacaaatggctctatctgcccgccataaagaaaacgcgccgtatcagcggttcgtctgccaagcaagactactttatgggtagcgactttacctacgacgacatgggcagccgcaacgtggacgaggatacgcacacgctcctgggcgaagaaaccgtcgacggacagaagtgctggaaactggaatccttgcctaaggacaagcgtgatatttactccaggaaaacggccctgatacgtcaggactgtctgatacctgtcagggtggaatattacgacaagatgggcaagctgcaccgtcgtctcgagatgtcggatattgccaaggtagagggcttctgggtagcccggaagatgcacatgaccaacgtgcaaaccgagcatcagacggttctcgaaatcaagaatccgacgtacaacattcccatggaggagagcaagtttaacgtgaccacgttagagaaaggcaggttctgatgaaagcgttcaatcgtctttccgcggggctttgcctctcggtctttctgttttgccccgtgcatggagtttggggacaaggagcgggcgaatcgtcgtggcagctcaaaggccttgtcgacacctaccacgccttccgctccgaaaagccgaacgattggatgtcttcccgtacccgactcaggggcgaggtcggcaaaaacttcgcaggctcttcgctcttcgtctcgttcaacgctacctacaacgccttgctgaaagagcgcaccggctttgaactgcgggaagcataccttgaccatcggcaggagcactggggctttcgtctcgggcgacaacttgtcatctggggtgcggccgacggcgtacgtatcaccgacctcgtctcacccatggatatgaccgagttcttggcgcaagactacgacgacatccgcatgcccgtcaatgccctgcggttcttcgtcttcaacgacaagataaagctcgaactgcttgccgttcccactttcgaaggatacaagctgcccaccgatgccgccaatccgtggagcgtgttgcctaaagaaacaccccggtcccttgtctgggacgcggagggaagccgccccgagctacgcctctccaacgtagaatacgggggcaggctctctttcgccctgccgggggtagacttctcgcttgccgcgctgcatacgtggaacaagatgcccgtcatcgagtacaaaccatcgggctcccaacttacggtttcgccccgatactaccgcatgggattcgtcggaggcgatgtctcaaagcccttgggacagttcgtgctgcgcggcgaagcggccttcaacctcgggaagcatttcagctacatacagcaagccgcctccacccctcaaaaaggattcaacaccatcaattggttggtgggggccgactggtatgcccctcatgaatggacagtgatggctcagttctcttccgagagtattttcaagtacgaaagctacgtcgcacagccccgccataattcgctccttacgctctgcgtgtcgaagaagttactggacagcaacttacagctttccgacttcacctatttcgacctcaaccacaagggctggttcagccgtttcacggctgactatgccctgaacgaccacatccacctcttggcaggctacgactggttcggaggaagcgagggtatgttcggcccgtataagcacaattcggaagtatgggcaaaggctaaatactgcttttgagatccacaccattttaataaccataaacaaaatttgaaaagattatgaagaagacatacgacagcagttaaagagaatgcggacttaagcaatcggaatcgtttaagttaaacggtgaaagacgttccaatggagcgatcaaagccgtttactgaagctgtttaagtagaacagcaaaattattcaaagtataaccatcaaaaacatcaaaagtcatgttactatacaacgtaaaaaaagaagagatgcgcatcggtaaacacaagggcaaaaccatgtattacgcctctcccattgcacaagacaagattaccaccaagcagctagaggatcggattgtcaatgccacagccctgagccgtgccgacgtgcggtcagccatcaccgccttggcgaaaatcgtacgtgaagagatgctcagcggcagaaccgttgacctggccaacctcgggtcatttaaggttgtatccaacgggaaacgcgtggaaacggaaaaagccgttaccgccgaaactctcaaaacaccacgcattcagttttttcccaaactcgaaatgcgcaatcaggcaaaaaacgtacagcatgtggtgatacgtgaaagcgaggccggatcggctaaaccgagtccgaatcccggagatttgcccgaagcacccgattctgctctttaatattcataacaagaaacaatgaagcagcaagtattatttttctttttcacgctgatgctcacaggtatcagcgtgtccgcccaaacaggtggaggacggattgcaggcgtggtcatcgacaatgcaggcgaagaaccactgcccggcgcaaccatcttcatcgaagagctgaaaaagggcattgtgacagacgggcatggcgagttcttactttccgatgttcccgcagccacttatacgcttactgtaaggtttataggctaccacacgcaaacccgcaagctcacggtgggtaaagagagagggaaaaaaatcatcatccgcctgaaagccgaagcaaaatcgttggacgaggtggtagtgatgggtaagagcgaagcccgtaagttacgggagcaggccatgcccatatccgttatcagcatgaaccagatacaaggaacggttaacaatgtacaagacattctggcaaaaactgccggaatcaccgtgcgtgccacgggtggaacgggcagtacctctcgcatatcggtgcgcggactggaaggcaaacgcatcgggcttttcattgacgggaatccgatgaacgacaattccgattttatcgacatcaatgatattccggtcgaaatgatcgaccgcatcgagatatacaaaggagttgtccctgccaagttcggaggttctgccgtaggtggtgcggtcaatattgtcaccaaagagtatccgcctaaatatttggacgtgaactattcttacggcagtttcaatacgcacaatgcatccgttgtgagcaagatgaacattgccccaaaaggaatcgagttcgggctgggaggtttttatacctatgccgacaacgactacaagatgaagtctccttttcaagaggggcttactataacccgcgatcacgacaagtttaaaaaaacagtcatcggcggtagctttaaggcacggaagtggtggtttgacttggtggagtttgaacccgttttcatacatacttacaaagatatacaggggatagaatcgaacatccggcatgcacacagccattccaacgcctttattttcgccaataagatggagaaagaaaacttcctcttagacggcctggacttggactggcagctggggtatatctataccgactatcattttgccgataccgcctcgcaccgcacacattgggatggaacgcattatccggcagtttccgaattcggcggcgaaatcggcaaatgggcttcattattgacgaatgaaaagcatcaattgcagcacaaattgaatctcaactatcttgtcaatgagaaccattcggtaaacttcaactctttgctgaaatacgctcatgccaaccctcgtgatgggatgaaggacaaggtcataggttatcgtaccgactttccaagcaatatgttcagttgggtggcaggcttgaattacgactatcgcacctcgaacgataagttccttaactctttcaacgtcaagtattactactactcgatgaaaacgcggatggcaagtgtcctggtaaagacagcagaggatatagacacacacaagaatgatttcggcatcagcaatgcacttcgctaccgcatcacacccagtctgatggcaaaagcttcgttcggatatgatgtaaggcttccatcggaagaggaactgttgggtgatggatacgtgatagctcctgccggcaatctcactcccgaacgcaatataagtgtcaacataggaatgttattcgatttaactggaaaagcctcctctaacttacagattgaactgaacggatactatatgcatctcaaagacatgattcgctttacgggcggattcttgcagtcgcagtatcagaacttcggcgagatgcggactcttggtatggaagcagaggtgaaagccgacatgacacggtggctctatggctatgtgaacgccacttaccaagatctgcgagatgtgcgtaagtatgaacaaaatacaactgttgccaaccctaccaaaggtagccgtatgcccaatataccctatctgatggcaaacgcaggattggagtttcacaaagaaaatctgttcggaggcagcgggatgaatacgcgcatattcaccgatgcttcatttgtggaagaatatctgtacgacttcgaacaaagccaattccagcagcatcgcatacctcgagccctctcgtgcaatataggctttgagcaaagctttggcaatgggcgctacttcattatgggaaaaataaacaacctgaccgatacaaaaatgatcagcgagtttaaccgtcctttacccggacgtagcttcactatcagattcagatacgtatttaagtaacaaattaacaatcattaaacaaaaaaagaaatgaaaaagaatgtattttttgtagcagcgatattcgctgcattgtgccttaactcatgtgacaagaatgatccggacaatcctattgcaggaggttcgggaaagattctcctaacaacagccctacccaatgcaacaggtatggatggaacggtttatatgcaactcattgatgagcctgtattaggcaagacgatggctaccaataacaacaatggtataaatgttccctttggcagttcttatcctatgataataggtcaggaagtctatgtcttcccaagctatcatttgacaatggacaaaaacgaactgattaaataccgtcgcacgaatggaattttacaaagagagggaagcttgcaattgcctgccaataacagtgccaacaatcttgtcaaactatcttccacaaaagcctatctatcgcttgccggactaggactgatttacatatttaatcccgaaacgatgcagaagacaggagagatcaacctgacctctttgggtattcaagataataatccggacatcggaatcatgattgagcgtgacggatatgtgtttgctggtctaagccagatggtgggaggttggacaagccctgagaattacaaacaagcagatgtagccgtcattgacaccaagacggacaagttggtcaagatgatttcagagaaaaccagtggtttttctcaagccacacgtccgatcgaccccaagtctttattcatggatgaaaaaggcgatatatacatttcttgtctcgggaacttcggaatggtggcaggtcataaggccggcatacttcggattaagaaaggagaaacagactttgatccaacataccattggacgataaccggagcttctatcgaaggagaagagaaagtagctggttttgccgcttcaatttgttatgcagccaatggcaaagcctacggatacattgatattcccggttattacaaaccaggagaaacgggacatggcgctatagcgagccgagctgtagtctttgatttatacaatcagaagatgaagaaaatagaaggattggatttgtccaatggctatggcgtgttagtgtctaaatataaagacggtttggcaatcgccaatgcttcaacgacaacaaaaggcatctattatctcaatcctcagacagataagattaatcctattcctatgataaccaccataggaaatcccatggctatagagtggttcggcaactaaacttataacgcgagttcgggatagcctccttccaaaaataaagagggtgtccgactgatgaagtgaccccaaaaatttggactggttaaacactatccagttatagaaagagttcggtattgtactggactctttccttttaaccgggacttaattcttttattattataataatctatatatccttccaaagcctttgtgaagtcttccggagactcgaacttttcagcgtatagaagttcagatttcataattctgaaaaaattctccatcatagagttgtccagacagtttccctttctcgacatactttgaattatatgatgctcttcaagccttttccgatatccgaagtgttggtattgctaaccttgatcagaatgaagtacgagtccgtcaaggttatcacacttatcaaatgctttatcgagcatgtcatatacttgttcaagatgaagtgcaccctcttacattttatttttttaggaatatccccaaataacttgatgtctgctttaacgatagaacctgttaggtgtttgcagcggacatcaccataacccattgccattaccactacttcttgcagttgttgtgagccctctcttaagttgatgaaaaacttccgctaattgtttaccggaacttcttgtgtttgataaccaatgaatgaaatgaccaaggtttcttcggaagatacattggctaatgcagtcggtgatacaaccgttgcttgtaccttttacgaagactgacgcaccggtaaccagaccgaaatcatcattcacggtaccggaaatgcttagctagaaatagcttgtgagctgattctattttaaaatataaatgttagttttatgttagataattccggatactttaatcttaagaatttgattataatacatatataaatttatttgttagatttaaagtttttttttataactgtaaaatacagatttagccttatatttacaatatgatattattgattttatctagtaaaaaagcttttgcattataaggacattcaattcttcttccagaattgtagtatatgttttataatcataccaataagataaaaaagataatggtcaaaataaagctctcaaaacaaaatacttgttgttcaattatcttataatagtaaaaatgaatttgttgattccgcaaaagagtttgtatcagatgttgaggtttcaacaatattaaatattacttttatttatagtaactaatttgcattaatatgagaaaggtatttattcttttgtttatttctttagcattgttatcctgtcaaaaagaggaaaacaatagaaaaacagagtatcaagtattaacaagtaaggacgcatccaaaccgtttagctgtcttggagagaaacgtattattacgattacgattataaaaaaaacattaatagatgatgttttaagttcagaggttccgattattcccagggatgtttcggtagaatttgataaaactcttttttctgatatagaaacaaaagtggagggcgatcaggtagtattaaatataacctcaaatattaataaagaagataaaattttgaatgctgatttacagatttcttactctactattaatggcataaaagtagaaaaaattccactaattatagataaaggaaagttgacatttgtgtataaaatccattcggaacagaatccttttattctaccagctgaaggtggtagatttgagtcaccttttacttgtaaaaaacagacatatttgaatggccagtttatagaggaaacttattcatcattaaacggattgagatttaaaacgataagtagtggtaatgtctggttccttacagtcagaaaagacggagaaaaaattggtttttacaaattttcttttgtgggagaaggaccatataaccaaaaaacagatccagagtgctattttaacatatatacccatgatgcagatttaattacagataatcctacagaaatattcagacaagattttatacaaccccagaccccgggtgaggattattataaaccttcccggtcctcttataaacatggcacttttgacttttaacgtattcagtattaaccttaattatattaattataaaacagtatacacgtttgttgattttgacaattatgtttttaacttcatatttcgatgacagagaagtaatgaaacaagaatcttcgccaccatctttagtaaaaaaaactcggcttatcgtaactagtgtatattcactactttctatatactaatgcacttcttaatgtaggttatgtagtaattcattatttgaaagctgataaaatatttttttttgaatattttatcagctttgtatattgcataatatgatataaatgagatttatttttgctgcctcttggcacgcagcatttctgccgccttcatttccgtccaacgctcgaagtcctccacctctttccttattttccgtatcagtttcctgtccctgttccactcgaagcagttctccagtatgtcaagcaccttagcgtccattcccccgtcacagacagcttccccaacaaaacccgttaaatcattgtgttaatatatatttcatgtatctttgcggcatagatatctgttgtgaaacaggaatctgcttatattattcttgcttgtgacaagccggaatcttataacttagtacaaaataaaaaaataaaagaggagagcttccgttctatggagctcctctcactttttatctctagtgcccgactgccttttatctttctactttcccaaaaggagtatccttcccgccagcatacagcacagcgaaaacagtatagccactaaattcttctcatttgtgcaaccccttctgtattcatcttccaaccttgtatatcgctaccgagatagaaaatggacagatgcacagctggtacgtcaattatcaataccaatatataccagttcatacgttctccccaataaaaagatcccctaatttatttctagttcacagtccaaatttatactttcctgtaaaatacaggatatagtcaagtcttcaaagtttttcccctaaagacacagaaatattacaaaaatcaattatcacattatatcttatttctgatgatacaaaaggagatggcaatctattttttaattctttagatgacataaagaatgcctttaaaattaattattcagaatctaatttgggactaccaattttttgtaagggatattacaaaaaacaattccgtttttactttaactataagttctggtagggaccatccaaacatgttaccagaccaacaagaccaaggggaagagtttagaaggatgtattacagctactaaagatgataaatgccaaaaccaaattcattgcaattggaattggggtaacagttattttttatttttagttcaatcaagccgggaagaatgattaataataaaagaatcaagtctttaaaggaagatatcaataaataactcttgcaacatgcagtttctttctggctgaatttgcgactctggagctatattctgaggaacggtttggcggcggaatatgccgttaaaccgtccggttttcgttaaacgaaaacacaacttgctgtcccctctacggggacaacgtttttaagtagaactgtagattgccccgactggtgcctccctcccgatggcaacctcttccgatttcggtctgcttcttcaggaaagttggcgttttttaccaatattccggaggcggaataggctgtgcttcctgtaatagtagagcattctacgattatccgacacatcagatagcttctttttcgtgataattgaatattcagagaactgaatattttgataatcggataatccgaatactattatatctgtagtctcttggaatgttacacagtgacaactgaataattggcgttttggatattgggataattgggtatttgaatattgctatattctgatatttggatattcagataatgggtaaacaattataaaagactacatttataaaaagctacaattataaaaggctattattatacattccccatcagagagaaagttccttgagcctgctgccgtccagccgatgaacggataccgtaccgtcacagtaaatagcgaatgtaggcatgttcccatccttcgggaaagtgatggagccggtattgcagaccactgtatgctctttccgttcaagtttccaccggtgggtgtgaccataaaaaagacaatcgaaccttcccttcggcagtctgtcctcattgtagatatgtccgtgggtgagaaagaaacgttttccattatccaccaacagggtgtaatcggacaggatgggaaagtccagcagcatctggtccacctccgaatcacagtttccacggatggcgacaatctcaccggccatcgcattgagacgttctgcgatccctttcgggtcaagtccttgaggtatcccgttccggggaccataattcaggatatctcccaaaatacaaagcattccgcattgttgctcccgataaaatgccagcacttgttccagtgccggtaacgagccatgtatgtcggacacaatcaggtatttcatcataatctattcgttatcggttaagttttcgcagcacaaaaataagcataattatctaatctccctaaccggggaaacgatgagaaaaaagacaggttccctgaactgtagattgctgtattgctgtccttgtagattgctgcaatgttataatcggatacataaaataagggtatttagccttagctaaactaagctaacagtctgacaataaggattctaatactatgatatgtgggtttattatgctaccttagtggtataataataaaggataaaaagctatgaacgaacaagttagaaatatcttagaacagagtaccaccaagacgagcaagattgagcagctgctccgtctgggcctgacgcgcagggaaattgccgatttggtgacacgcggcaactatggttttgtatataatgttgagaagaaaatgcttgaaagagaaggtggagtcttgctgaacagggcagcaaccaccctgatggattacaccttcacccacaagttcggtattgagattgaagcctataactgtaatatggaaagactggcacgcgaattgagggaggccggcatccatgttgccgttgagggttataatcacacgaccagggatcattggaagctggtgacggacagcagcctgcagggaaataatactttcgagctggtcagcccgatactggtgggtgagaatggcctgaaagagctggaaacggtatgctgggtgcttgacatctgtaatgcaaaagtgaatgacagttgcgggttccatgtccatatggatgcggctagtttcaatctggacacctggaagaatctggctttgacctacaagcatctcgaacacctgattgatgcctttatgccaaggacacgccggaacaatacctactgcaaaaccctctccggtgtttccgacgagagaatcaaatcggtaaggacgatagacggcctgcgggaggtctttaataatgaccggtaccacaaggtcaattttgaggcttattccaggcaccggaccgttgagttccgccagcattccggtacgactaatttcacaaagatggagaattggatccggttcttgaacggattgattacctttgcgaaaagatccagccttcccagccggatgacactggaggggttacccttcctggacgggaaacagaaattattttttaaacttagaactaaaaagttagcggtatgatacagacttatcatttgctggatggcggtcagataaccgcctccagcccggaagagttcgtccggctgctccgtgaggggagccggttcgactatgattgcacggatcaggagtatatggagaactttgcccggcgttacggggagctgcatggcgtgtcagttgccaccgatacccctgaacatttcctgacggacttgcaagccgccggttatgtccggtaaccggtatcgctcctttattattagtccctgcttcaaagatgaggcagggatttttcttttttcattgcaacctttcctgtctgcctgacggcatttcctcctgtcaattcctgactatccatgactatccgtgacagggtatttcatcttttcccggcattcctttcttttgcagtgtagaacgatatacaattataagcattacagttttacagcattatatttttatctgattatataaagaaagcgtatgaaaaaagaaccgttattaattgcctttgccagccagaaaggaggagtcggaaagtctgccttcacagttctggtggctagtatccttcactaccagaaaggtctgaaggtgggtgtcgtggattgcgactccccccagcacagcatctcccggatgcgtgaccgggacatagaaagcgtgcaggaaagtgattttctcaaagtggccctctaccggcagcatgaacaaatccggaaacgttcctatccggtaatcaaaagcaatccggagaaagctatagaagacctgtaccgctacatcgaagagcaggatgccgtctttgatgtcgtactgttcgaccttccgggaaccctccgcagcgaaggggttgtccataccatttccgcaatagattacattttcatccccctaaaggcagataatgtcgtcatgcagagttccctccagtttgccgaggtggtggaggaagaactgattgccaggcacaactgtaacctgaaaggcatctatcttttctggaacatggtcgacaagcgtgaacggacagaaagctacgagtcctggaaccgcgtcatacaaaaagcggagttacgcctgctggagtcacggataccggataccaaacgctataacaaggagctgagctccctgaagaacagtatcttccgttccacactgttccctcccgacaaccgccagataaaaggttcgggcctctgtgaactgatagatgagttatgtgccgtaacacatctggataccacccataccttataataaggggaattatggacagcggaaaaaagagatttgccccccggagcattgacgagaaggccatattggatattgtcgccaggaaagggacgatacgaccggactcccctgcaacgagtgcatccccgaagccggaggatacggtagaggagattgccgggagtagcgaagctccggtctttaccaccggggaaatcgacgcttacagggcgtccttcctgaatacggtcagaaccaaatcccgtaaatcattgcatatcgatgccggcctgcatcgccgcatctcgtccctggtatgggcggtaggacgtggcgaagtgaccgtagccggttttgtaaaccaggtgctggcacatcatttcgaagagaacggcggattgataaatgccgtgctggagaagtattaccaatcactaaaatcataaggacatggaatacctttttattatcctgttcatttatgcctcttacctgagtattgaaaagtatgtgcatacaggcagcattttcacatggagaggcagaaaggacaggaaggaacgtcgggctacgcctgtcaccatccatccggcagcttcctcatccgagacggaaataataggcaaaagccgataccaaatacgacaatcactgacaatagatgacaatagcggacagcctgaatcaggcatagaaaagagtgatacctttactcccgaaaagaaaacagagccggttctccgagtgcgcgaaccccttgataagaatacgaaattcccggaagtcccggctccttttcaaaaactgaattatcctgaaattgattatatgcgggaggcctctccttcttccggtgaagaaaaagaggagattcccgaacgctacgagattacaggatacgtacagcggagcaatccccaccgggcaaccggtgtcacctttgacgatatggatatgattgagaaagcaatggcatcggacgaacttacggaagcggaacaggaacaggcccggcagactttccaaaagctggaaggcacgaacatggaaagggtactgcaggcgagcgtcctgggaagcagcgataaactgaaacgctatatgcgcttgtatgtggaccggggcgagccccatttattgacaggaaagaatagggacgacattctccgggaatttgatattagggagcatgtgcccgaataaatagaacaagtaaggaatatgagacagtattatgattccggttgatccgggtgcagcgagttttaaaacagaatgtataacctaaaaagacgaaaaagcatgaaagatttctttgactccggttgatccgggcaggacgagttcttgagacgtagtgtataacctgttagaaaagaagatatagagatatgagaggcttctatgattccggttgatcctttccctttaccggagcgaacattaaaagagtgattaaccccttaaaaacggaggtacctatgattggttactatgactcaggttgattctaaaaagacatcgtggttgcaagagacaaatccgcaggagggcaacttcctgcggattgtttgaaacaagatttttattcacactaaaaaattagattgcatatgaaaagacattttaaaaagacggttgcgcttatcgcatgaatagctgtttccaccttgggtgcctatgccgaaggggacggaagtgccggtataacaaaggctacatccatgcttaccggttattttgaccccgccaccaagttgatatatgcggcaggggctattgtggggctgataggtgccattaaggtatattcgaagttcagcagcggcgaccccgacacaggtaaaaccgccgggagctggtttggagcctgcgtcttcctcatcgtcgcggcgacagtccttcgttccttcttcctgtaatatagcagactatggaatacaatatcaacaagggaatcggccgcaacgtggaattcaacggcttgcaggcacaatacctgtacttctttgtcgggggcttgctggccattttcctgctgttcgtcatcttctatatgataggtattgaccggtggttctgtatcggtttcggtgtcctctccgctttctctctgatcttcggggtgttctacctgaacaagaagtatggtcccaacggcctgatgaagctggccgcagtcaagtaccacccgtcctatatcatcaatcgcaaacgtatatcttccttatttaaaaaacgcattcatgagaaatatattaaaagccgcaacgctggaaagtaagtttccgatcctgtccgtggaggaagggtgcattctctccaaagacgcggacgtgaccatcggcttcaaggtctttctgccggagctgttcacggtcacttccgcagattatgtatccatgcacggcacatgaacaaaggcagtcaaggtactgccgaactatacgatagtacaccgccaggactggttcctgaaagagaattacagggccgacacgcataaagacgggatgagctttctggatcgttctttcgagctgcatttcaatgaacggccttatttaaatcatttttcttacctgttcatcactaagacgactagggagcgcagccgtagccggagcaatttctccatcctctgccgggggaatatcattccgaaggaagtccgggacaaggatgcggtcagccgctttctggagagtgtcgaccagttcgagcgcatcctgaatgactcggtctttatccgtctggaacggttgaccaccgatgagattgtcggcacaccgcaacaggccggactgatcgagaaatatttttctctttcacaacaggacacgaccacactgaaggatatacagatgagcgcgtccaagatgcgcatcggggacaatacgctctgcgtgcatacgctttccgacgtggatgatcttcccggcagtgtccagacggatacccgctatgagaaatactccaccgaccgcagtgactgccgtctgagttttgccgctcctgtggggctgatgctctcctgtgaccatatctataaccagttcctgttcattgatgattcggcagaaatcctgcaacgctttgagaagacggcacgtaacatgcactcgctttccaagtacagccgtgccaaccagctcaacaagcagtggattgacgcgtatctggacgaggcgcattctttcgggctgaccgccatccgttgccattgcaatgtcatggcatggtcggacaaccgggagaagctcaaggtgataaagaacgataccggttccgccctggccctgatgggatgcaagccccgttacaataccattgacgcgcctgccttgtattgggcgggcattcccggcggtgagggggatttcccttcggaggagtccttttttactttcatcgaacagggagtctgctttttcacggaagagacgaactatgcggattccctgtcgcccttcggtatcaaaatggcagaccggacaaacgggaagcccctgcatctggatatttcggacgagccgatgcgtcgcggtattacaaccaaccgtaacaagctggtcatcgggccatccggttcgggcaagtcgttttttatgaaccatctcgtcaggcaatattgggaacagggcacccacattatattgatcgatataggtaacagttacaagggcttatgcgacctgatccatcagcgtacaaacggtgaggacggtgtgtattatacctatagtgaaaaacgcccgatagcttttaatccattctttaccgaggataaggtctttgacctggagaagaaagagtccattaaaacactgatcatgtcactctggaaaagggatacggaagtcattacccgtgccgaggaagtagccctttcaatggcggttaacctgttccttgaaaagataaaggaggacaatgaactggttccttcttttaatactttctacgagttcgtacagggagagttccgtggaatactggaggagaagcattaccgcgagaaggatttcgatctcactaactttctgaatgtattggctccatactaccgtggtggagaatatgattatctgctgaattcggatgagcagctcgacctgttgaacaagcgttttgtggtatttgaaattgacgaaattaaggagcacaaaatccttttcccggtcgtgactgtcatcatcatggaggcgtttattaacaaaatgagacgtttgcatggggttcggaagatgatagttgtggaagaagcttggaaggctatcgcacgggaaggcatggccgattatataaagtttttgtgtgcgcccgtaaaggttgcatcgtaaatatctctttggcaagagattaggaaagtgttctttgaaaatgacctatcatcagccgacttatctgtttcgggaaaacttaaccgagcagggagtgtagcatgtcggaaaagtcataagtcagttagttaccaaactgcgactgaatggcgagatgaaaagatagatatgaggataaagtccgaattgattgaacgatagtccgaatggtcccccttgaggctatggcgtaaggtaactatcaatcgccatatcgtgatactacttcagtgtataggaatgaaggtagcaagaacttatcacgacacaaccgcagtaagcgagtaaaggacggaagtcgtatccgacaatctatcatgccaacagttacgatgtaataaacggggattacctatcccgaagtgccgaaaggctattaggttcgacctatgaaaattcggagtggtaacggagcttccatagtagtttgagcaaggtaacgccttgtacatggcgaagggaagcagctaattattaatacaattaacggaaaatgtgagagacattatgagaagtccagaaagagtattaaacagtctatcagaacacagtaaggatgcaagctataagtttgaacgtctttacagaattttgttcaatgaggaaatgttctacgttgcctatcagcgtatctacgctaaagagggtaacatgactaaaggttcagacggtcagaccattgacaacatgagcctgaaacgaattgaaaagttgattgatacgttaaaagatgaaacgtaccagccccaaccgtcaaagagggtgtacataccgaagaaaaacggtaagaaaagacctcttggcgtgccgactttcaatgacaagttgatacaagaagtagtaagaatggtactggaagccatatacgagggaaattttgaatacacctcgcatggtttccgtcccaatcgaagctgccatactgcattaactcatatccaaaaggagtttaatggtgcaaaatggtttgtggagggagacataaaaggcttctttgataatataaaccatgatgtattgataaacattctcttggagcgtattgcggatgaacgcttcatccgattgatacgcaagtttatgaaagcgggatatatcgaagactggcaattccacaatacttacagtggcacaccgcaagggggtatcatcagcccgatattggctaatatataccttgacaagctggataagtatataaaggaatacacagccaaattcgacaaagggaagaaacgaaaattcagtagagaaagtatggactttggcaatgcaagaaaacgtattgtgcgaagattgaagttcgtaaaagacgaaaggcaaaggacaaagctaatccttgaactgaaagcaatagaacaaggacgggctaaatatcccaacggcgaagaaatggatgccgattacagaagaatgaaatatgcaagatatgcagatgattttcttgtgggaattatcggaagcaagcaggatgcgcaacagataaaagaagatattaaaaacttccttgctgacagactggcattggagctgtccgatgaaaagacacttgtcactcacacggaaagaccggccaagtttctcggatatgaaatcactgtaagaaagtccaatgaccaaagacgggataaacggggtagattgagaagaacctatggtaaaagggtctgcttgaatgtcagtacggaaacagtccgtaaaaaacttttcgattggggagtcttggaactgacaaaccgtaacggaaaggaaatatggaaaccgaaatgtaaatcgggactgatattcaatgacgaccttgaaatccttgatagttataatcgggaaatcgtggggttctataattactactccatagccaacaactgcgcccatgccttgaataatttcaagtacatcatggaatacagcatgtacaaaacgtttgcaggcaaatataagtgccgaacacgtaaggtaaacaagaaatatcgtaagaacggtaggtttatcgtaacgcacatgactaaaactggtgtaaaggaaagatacttttacgacggtggcttcaaacgaaagaagcccacctataaatcggaatgtgacattatgccacgaacaatttatactgcggggcggacaagccttgttgaaaggctgaaagcccgtgagtgtgaattatgtggagcgacagacgaccttgttatgcaccatgtaaggaaactaaagaacttgcagggaaaggaaagctgggaacgacacatgattgcccgtaaacgcaagacgattgccgtgtgcaggagttgtcacaagaagatacatgacggaaagatagactgaaattagtggagagccggatacgctgagaggtgtaagtccggttcgggggcgagcatttggaaacctaccatagaaatatgataaggcgctgggtgcttagcctacacaaaacggttagaaagtacttcggtgaggctgtggttgtcactcaagagttggatgatatcgtgtcaagtcccattatcaaggacaccatcatcaacaatgccgattgcaagattctattggatcagcgaaagtatatcaacaagtttgactccgtacagtccctgctcggactgaccgacaaagaaaaaggacaaatcctgtctatcaatcaggctaacgatccggcaaggaagtataaggaagtttggattggtctgggtggtgtccagtctgctgtctatgcaacagagacctctgtcgaggagtatctcacctataccacagaagaaaccgaaaagttggaagtcacacaaatgaccgagaagctgggcggtaatatggagcaggcgatccgcgtattggctaaagagaagaaaaagaaaaaataaacgattaaaatcaagaagcaatgaaaaagagaattttaagcatgttgtttgtcctgtcgccctttatggtaccggcaagcgtgcaggcacaatgggtggtcagcgatccgggcaacctcgtccagggtatcgtgaacagtgtcaatgaaatggtggaaacatctgaaacggctcaaaatgcactttccacatggaaagagacctcaaagattttcgaacaggggcgtgagtattatgataaactgcgtaaggtgaatgacttgatcagcggcagtgagaaagtaaaagagtccgtcctgatgctcagtgacatttctgaaatttatgtaaacaatttcggcaagatgctgaccgacaagaatttcagccagcgggaactgaatgcgatagctgccggttataacaccatcatgaagaagagcagccgcagcattgcagagctgaagaatatcatcaaccccaccggcatgtccatgaacgacaaggaacgcatcgacctggtgaaccgggtatacagggaaatgacacattacaaggaattggccaactactacacccgcaagaacctgcatgtatcctacctgcgtgccaaggagaagaacgagcagcaacaggtattcgacctgtacggcaaggatgagcgttattggtagtctacaattttaaaagaatcaattatggtattattatccatttcatttgaaaatatgcaccagattcttcggaatctctatgatacgatgaccaaactctgccacccgatgatggacatggcgatggcactcgctgcattaggggctttgttctatatcgcttaccgtgtctggcagtctctctcccgtgcggagcccatcgatgtcttttcgatgttacggccttttgtcctgggcatgtgtatccttttctttgacgtgatggtgctgggaactctcaacggtatctttagccccatcgttcagggaaccggaatgctgctccgtgaccagaccttcgacttgcagaagtaccagcaggagaaggacaagctccgtgcggacatgatggctaagacgatgatgaccggacgtgtctttgcttacaatgaggagctggatgcggaactggataacatgggctggagtgaggaggaacatacggccttgcagaccatgtatgaggtttcgtatgccttctccctgcaaggtattgtccagatggtcatgcgcaaattgctggagattctcttccagtctgcctcgctggtcatcgacacgatccgtaccttctttttgatagtcttgagcattttggggccgatagcctttgccctgagtgtttttgacgggctgcagaacacgctcatccaatggctggcacgctatatcagtgtctatctctggctgccggtatcagacctattcggggcgatgcttgccaagatacagacgctcatcctgcaggaagagatgaacctgatggccgatccgatgagtatcatcgacgtagacggttcctcggccatctatctgatattcatggtcatcggcattatcggatatttttgtgtgccgactgtttcgaactggattgtccaggcgggaggtatgagttcctataaccggaatgtcaacaatacggcatccaaggtgaccaatgtagccggtgctgcggcgggtgcttcaacgggaaacgtcggtgccgtattattgaaaaagtagaaattgaaaaaacataaaattatggaatttaaaagtttaaaaaacatcgaatcctcgttcaggcagatccgtctgttcacgttggtctttctgggcatttgcgcctcgctgactacgtatgccatttgaaggtcctatctctttgccaaccagcaacgggagaaggtatatgtattggatcagggcaagtcactcatagtggcgttatcccaggatgcggcattgaaccgtccggtggaggcccgcgagcatgtgcgccgcatgcatgaactgttctttacgctggctcccgataaggccgctatcgaatccaatatcaaccgggccatgtatctggcggacaagagtctttatagttattaccgggattggaacgagaaaggctattataaccgtctgatcagcggcaatatcaaccagactgtcctggtggacagcatgcagtgtgatttcgataactatccgtaccggatcaccacctttgcccggcagatgattatccgaaacagcaatatcaccgagcgttccctggtcacccgttgcttcctgcagagtacggtcaggtcggataataatccgcaaggcttcatggcggaacgctttgagattttggaaaacagggatataaggaccgttgaacgctaatataataaggtaatgaaaagcaggaagataaagacagagatcagcgaaaagctaaagaacgtttgcgaggagctgtccgaaaaagagcgtaagggagtgcttgtgggcatgctggctatcagtaccgttctatgtgctatcaccgtaacacgcgctttcgggcgttttctctcccacggcacacaaaaggagttgccgtttgtccatccggcggactccatccaccgggcggataaagacagtataatgtatcaccctaaaacccacgagtaatggaagataaagatttggaaaagcccgaagcggcagaagaaacggcggtacagccggaaaacgtcagagccttgaaggaagaaccggaaaaagagaagaaggtgctcacaccggaagagatggaaaaaagaaggaagttcattgtgattccggcctttgtgctggtcttcctgggagtcatgtactgaatatttgcccccaccggcaaggaaaacgggacggaagctcccggaaattcaggattcaatgtgaacgtgccggagcctaccacggccaaactggttgataagaagaccgccgcctatgagaagcagcaggcggaagtggaggaagaaagccggatgaagtcgctggagcagcttgccgggacattgatgaataatggaaaatcatccgataccggtgaaaaagaaaaggacggagaccggttgcaacagtctgttaatacctacgagcaaatctccgggcagttggatgatttctatgaaactcccaaagagacggcaagcggcgatctggaaagaaaagtggacgaactgaataaaaaactggaagaggcggaaaaggaaaagagcaaggcggctacccgtgaagaactgatggagcgttcctacaggatggcggcaaagtatctgaaccctgacaaggatacggttcgggagaaagctgtcggagaagaacccacggaagttgttccggttcagcgggcggagtatcagacgacttccggcctttcacgacctgttacggattccgcttttatcgcttcgctcactgtcgagaggaattacggttttaatactgctgtcgggagcagctaccaaatggggacgaataccatcgccgcctgcatttcggagaaccagaccattgagcagggaggcagggtaagactccggttgctgcaacctctgcaggcaggaagtattaccgttccggagaacagtctggtaacgggtgcggcggtcatacagggagagcgtctggatatcctgatcagcagcatcgagtatgccggaaatatcatccccgtgcagttggcgacttacgatatagacgggcaaaaagggattttcgttcccggatcggaaacccgcaatgcggcaaaggatgcggctgggacggtcagcgagagcatgggaaacagcgtatcattcgcacgttctgccggacagcaggtggtcatggacctgacgcgcggagtcatgcagggcggcacgcggttgattgccgggcgggtccgtgcggtcaaggtgacgctgaaagccggatataaggtgctgctggtcacaaagaaacaataacggattattcactttaataaaaaagataagacaatgaaaatagtaatagcattattgatggctgtactggcctcggtatccggtttcgcacaagaagaaagaccggcaaatcccgtcaggattctgacggcgggccagcatatcactccttataagatagaggtcactttcggaaagacggtgcatatcctctttcccactgaagttcgttacgtggacctgggaagtaacaatatcatcgcaggtaaagctgacggggtcgagaatgtggtgcgtgtcaaggcggcggtgaaggagtttccgggcgagacgaacttctccgtgattacgggagacggttctttcttttctttcaatgtggtttataaggaggagccttccacgctgaatatcaatatggaccagtggatgaacccggacgagggagaaaagaagggaggcagttccatccgtgtcacggaactgggcgaggaagatccgacggtcattgccagcgtgatgtacaccatccaccggctggaccgcagggacgtgaagcatatcgggtgcaggcagttcgggatgcaggctcttttgaagggcatttatgtgcataaggacctgatattcttccatgtttccctgacgaacaattccaatgtgcctttcgatgtggatttcgtgcggtttaagatagtggataagaagatagccaaaaggacggcccggcaggaaacttatattgaaccggtacgcacgctcaatgccctgacacgcatcgtgggaaagagcacgggacgtatcgtgtatgccttcccgaagattgtcattcctgacgacaagttgctggaagtggaaatttacgagaaagggggaggccgtcaccagcggttctatatggagaacagtgatctggtggatgcgcgtattgtgaatgaattaatcggtgagtaatcatgaaaagagttttatttattatgttatgcatttgtctgccctttgcggcaggcgaatgctttgcccagcgttacctgccgggacagaaaggtatccagctcatgttaggcggtgtggacgacttcggttcgaatgtgaagcatctgcgtggtaactttcagctcggagtggctctgagccggtataaccggaaccattcccgctggctgttcggggcgattatgtgaagaagcactattcctacaaggacattgcgattcccaaagcgcagtttaccggagaggtaggctatttcgtgccgttcttctcggaccgtggcaggaacgtgttcttctctgccggtctttccgctctggcgggttatgagacgaccaactggaactgcaagctgctctatgacggggcgactttaaagaatgacggatgcttcatttatggttttgccccggctttcgagatggaggcgttcctttccgacaggctggtttttcttttcaatgtccgccagaggatattcttcggatcatccgtggggaatttccacacggcggtagttgtcggtgtcaagtacatttttaattagcggcaatagtatggaacaaggcaattggaacgtggatgagatgcttcattggctggatatgaaaataaaccgggaagaccgggacatacgtgaacaaagcaagaagatgaatgggaatttcctgcactttttcgaatggaatgcggagagcctgtataagtctcattttatgtccgggtgttataagatactccggcaggcggtggacggggcaaaggacatggatacggttcggaatattgttgaggacaacattgcttactgtgagagcaaactgttgaacggtcaggtggattgtaacagttccagccggacaacgaatgttgcccatttcctgaagttggagtgtatgcagcagttggttagggattaccgggaattcgcgaatatccttgcgcaaacgcctcccgaagagaatttgcaacagacggctaataaaacagaaaagaagagagaagagccgcctgaaagaaagataaaaacgggcatcaggcgttagccgacaacggactcaatcaagtaaattattcatttagtaatacgtaaaatcatgaagatgaaattaataataagtggtatcatgctcacattgctttgcctgctgggtggctgtgatgataaattggaagtacagcaggcttatgatttctcgctaacgtcctggtatctccagaagaccatttccccggatgaaaccgtggagattcgtctgacactcaatcgtagcggaaactatgaggaagccggctatcaaatcggttatatacagatggagggcagcggcgaggtgtacgacaagaagaaggtctatctggtgaaccgggagatgcaaccgttggattcgatagcggagttggatgacagcgatccctgccgccaggtattcacgctcttctatcataaccgaagcagcaagaatgcggagattaaattcgtgatagcggataatttccatcaggaaagagaactggatatatcctttcagagcaaaactgaaacggacatggaactataaatcggacaacaatggataaaagtgatttaaggatcgaacaattgcagcaatatcttgacaagaagaaaggggttgtggaaagcgatataaaagagtataaccagcaactgggaaaaaactatcttcatttctttgactggcatgccgatgacttgtataaggcctgttatatggataagaattataaggccattcaggaggcgattgatgccgctgaaacgccgaaggatattgaagggattttgaagcgttataccctgtatatagaagatgatctcctgaacggtccgcttgtcaagaaaagtaccagcccgatgtcgaatatggcccattccctggagatagaatgcaaacagaaattgctgaaggacctccggtatttaaacaggcttcttcagagtgagactgtaagtgaaaggataaggccgcaagaagcaccccgacaagagattgtgcctgtgaaagaaaagaagaaaacgggaccacggttgagatagtatcaattgaaagcaataaaaaagctactgaatttttgtttcagtagcttttttatttatcccagtcttatattccggctataccagataagcctcaaaaagataatgtatgaataaccgacccttttccgtccaaacggtcaacatggccgtgccggtttctcctgtgcggctttcccatacatgggtccgggttgccgtatagccttgattctgataaggagctttgagcagccattgaccggattgacggaactggatgcctgcccatcgaagccgtttgttcagcataccggcagtcattcccaattctttcgctatctgtgtggtcgtgtaggtgctttgggattggaggactttgtcataatactgaacttttggggcctgtagcttgagtttcaggatagcatagttgttctccttctccaatgctgaaatacggctgtctcgctcttttatacggttctgtgcgagcaatatggcacgcgcaagtagttcattatccgtttcgccattcttcttaagaagatagccaccgttctttagtgtttcgggaaccagttcatcaaatatccagctttcgaatttctcagcggaaggcagcttgctaccggcaatcagccggtatacgttcccttcgctgatgtacttgattttctggacggcactgcgtgtaggggtgtcgtaaaccacgacgcccattggtttacaatgtcttacgacggcatctctcggattggagtagccaagtgcggcggcaacatctgaggcgcagaaccatattttcccgtcaatttccagtgtccggatgcgtccgaactcaggatgttcaaatattgatactttattcatgactgtttaatttataggtttcttctattgctttaaatatctcgtagactacctgggggacgatagcgttcccgtatcctttaatggatgcctgtcttcaccgagaaaaggagataccgtccagtcgggggggaagcccatcatctcggctacaaacaggggattcagctggaaactctttccagtccgggcgaagaaatcgggcaggctgttcttttccggtatccggcctctcttctccagactttccgggcttgccgcgcccttccagtccctcgctgtcggagtgggcagaagctccgccatcctcccaagccctacactccagacatggcctttctgattgatctttctcacctttcctttcggtgtcactatgatcttgtcgtttttccccattaccgcacccacaccggcatcgctggctaccggggtgggcagcagcatcccgtaaaagtccagaaagtcgctcaatccgttgggtttcttctcccctttgagctggctgtgcagggatggagcatgggcctgtttccatttgtgaaccctttccggatggtgtatctccgtagccaatggagtgggaaggagtatttcatggatcatctccggcaatccctgctggcggctgttcggtcccctgcgcttgtaatcctgggctgtcacggtgggcaataaaccatacccggtcccggcggtggggagctccgacggcacaagccggtataagtaccggctggacggaatatccttcacgttcaagatcacggcaaatggtttcaacaacatattgctgccgtcttttaaatacaggctcactctctccgaatagagtggactgacttcccacttcagtctcctggccgggctgtaccatcgtgaggatgccagcaacgttctcaccaatgacccaatcgggcctgatctcatgtatggccctgagcatatgaggccagaggtaacggttatcatccgctccttttctttggcctgcgacagagaatggttgacaaggaaaacctcctgtaaggacattgatttttcctctccattctctgaaatctgtcgttgcgacatctgtataactttttgcatctttaaaccagtaatttaaaatggtattacaaaaatcgtctatctcacaatggaaggcattctgccatcccattcattcggcagccaggtctggggcgccgaatccactaaacagagaagcgtgtaccagacgcttccgctgtttcttgtcttgctcttcttctttcattgtttattcattatttagaggttcgagattcattacttttttgtcgatcttacgatagacactccccatctccagcatattctccaatcggagcaggtccgtgatttcatagacggtcatccctttctgtgtcgtgaagcggatatatcctttctgtcgctgtatctccacttcctcgggagtcatgtgcaggacttcacagatttcctgcaaggtcagggtcaggcttacttccttaactgtgtagatgtaggtcaggatgttcagcatctgaagacatttgcggtgtgatttgacaagtgatgcgaatttgtttcgttctatgacgattactttagcttgattttccatgtgaatttttatttatgagttaatagaatcggatatgaaatcttcgtttagacattcttctctcaggaatttatatacgtcagaagcccagaagtaaatcttgccgctgagtttgaaaaatgggagtttgccggaattacgccagcggatcagtgtccggtcgcatactttcagcatcaggcgcatatcccggctgtccagcatttgcttgccgttgaaactggttactgcttccagagccgtttccagcttggcaatcagttttcgttgttcctcaaagttttcctttatcattgctttgagtatctcaatatcatttctgttctcttccataaaatattcctttgttccaatgggttatttttctttcttcggttgcaaagttttcaaaattgggcatgaaaaaatagggctgacggtaaccgccagccccatattttctttgtaacttacttagtatcaatgtcgatttacagaatgctttttttcttcctttaaggtagaaagaaaaatagcagtagttaccattcttttcaaaaagatatttataggtaaacaatataatgaagggcaccccaaaaatcagattttactcttctcagaactatcagtagaggggtaattttctataaaaagttttttagtaccctccaattaataccaagccttctaataaattcagattaacttgtaaccgtcaaaaacattaattacatttgtgttagagtaatacttgaaattgtacagagcaacagaatatgtagctggattgcgctactacaatactgtttctgccagttttaaagcagtaaaatgatttttcctttgttttaaactaaaaattatgacgaaacaagaactgttaattgggaagcatccagataattcacatccttatgggaaatggcttgctgcaaatgatttgccagattcctatatgaaatgccacagggaacttactgaaattacagctgtagatgatgagttaatagaatggatggcaaaaaaaataattaatcaccattatactcagtttagaatatctaggttaaaagaaaaatataaaagtttaggctttgctaaatatgcagagcagcatagaaaattacctattacggataaggtgaaaaaaggtaatgctacggaaatattacttactgattatattcaagcatcacaaaaaaaagaatttatcaaggtatataaattgaaatataatccaaatgttgatcaagccattaaaggagatgacactttgatggttgatttatttgaagaaaatggtaatgagaaaatcaaaatttatttgggagaatcgaaatttcgcactactcctcaaaagaatgtagttgaagatattaccaaatctttaaacaaagatactttgcctttatcgtacactttcttagtagaagaaatagcaaaatcagatgaattacttgctcgaaagctggatgattatatagtgcaagatataaaagatagaggcgaccttatttatgttggtttgttactaagtaataccaagacttcagaaacagttgaaaaacatttgaatagtgataattcaaatttggttttcatttctattggaattggtcagccagaagagtttattaaatccatatttgaaaaagcagaagaactaatatctaaccctgatttattatgaatatagagcatgttgaaaaaagctaccaagaattagaatcagattctactttgcaaaacttaatagctcaagctaacgctagatatatcctatataatacggaagaatctaaagaaaattttcctcgatatacaattaaagatgagcagctaaatatcttagctttcaaatatctaaatattggatgtaattattttagtgaacataattatctaaaagcatctcattctctagaaaaaggagctttaattcttgagtataaacacggttctataaataatcagacaaaaaataagaaactattttgtctaatctccgctctttcttattacgtttgttttcaatactctaaggcatttatacttataggcaaacttgagagtgatacaatgatttcaagtttagtatctctatttcttaatagaaaatttgatcagttattaagtgaaatcgataaacttattacaaactccagttatggggatgaatatctggctgaacattttgaagaagattatgctacaaaaatttatgagataattatagcaaaatcattaaattattatgtgcaattttatcagacaggaaacaaagattttttagaaattgcaaaaaaggatcttgtaaatcttcaagaagtagccgcaatgagaggtgaacctgatgtttggtgggttattcgattattacttctcattatagatggatttaaagaatcctcattatggtatgtattaggaaattattttaatacggaagataaacttccgttaaagtatatacaatcattagtttataaaaatggcagtataacagaattgtttcttactcaaagaaactctttaccaaaggttttgaataataagcaggggagtattgttagcattcctacaagtagtggaaaaacaagaattggtgaaattgcgattttaaactgtctattaaatgaacctaaagcgaaaattctttttatagccccttatagatcactagcttacgaaatagaaaattcgtttgatgagatttttagcaatcttgatgtttcagtctcacatctatatggtggaagtttatttagtaagcttgatgaaagaattatagacgaatcatccgtaattgtagcaacaccagaaaaggccaaagcactctttagaagcaatgaggatattttatcatgtatcaaacttgtaattatagatgaaggacatttattgggaactgataaaagactcatagttaatgaaatgttttatgaggaattaaagtatcatgtaaaagctaatggtggaagattcttgttattatctgccgttttacccaatgcagaagatctatctgaatggctaacggattctactgataatgtttacaaagagaattggcgaccttctgatgaaagaatcggaataatggaatggaatggagtttctgtgaatttaaattggaaaagcactgatgcagaaagaaattcatttaatcctaattttattatgcgacaaaagttgcctaagaagcctaaagaaaggataatgcattactttcctgaaaataagaaccaagccatagcttctactgcatataaactaaggaagtttggtcctgttttaatattcgttggaatcaagaaatctgtttttgccattgcaagagagtatgaaaaatgtattcagcctgaagaacagaagtttagatttagaaacaaggccaattggagagcctttaaactggcttgcatagaatcttatggtgaagatacggaatgggttaagtttgctaaacaaggaattttctgtcataatgcagatttgatctcagatgtgcgaattcccttagaaagattaatgagaagtgagaagccaagagttattatagcgacttcaacattaggacaaggagttaatcttggagtttctactgtaattttctcaactttgtatcaatcaggtaatcctattacgaaaagagatttttggaatattgctggtagagcggggcatgcttttgtagatcatgaaggcaaaattttagttgctcatgatataaccaaaaaagacgagaataaaataaattgggaaagaaaaatgatttctgcatatcttaataagagtaatatagatagagcagagagtggttgtttggaactaataaggacacttaaaacagtggctcaacttaacggaatagcatttgataacttaattaatttacttgctgaaaatcgtattaatgaaattgatgagtctttagatgaagttaatgatcttcttgatttgattgatgacggattattatcattgcataattcgaataattttgaaggaaacacattggaatggattgatagttattttactaaatccttagcctatatacaagctcaatattatgaagatattactggcgatgaagttctcgattttataaaggctagaattaaaggtataacaaaaaaggtagggatagaaaaaagtatttgggaaagtattgtatcttctggtattccaatcaattcagatttgcaaatagatgagaagcttagcgagattattagtattgttcaaagctatatagtaagtgataaaacattagaagaacgcatttcacttcttgaaaatatagaagacgtcattagagatgtgaatatatataaagaaaaatttgaagatagtgttgatataaaagagatacgaaaaaagtggttaagtggaatatccatgtcagatatcgttcaacatgaaaatgcagttaatatagtaactcaacattattctttcaatatgccttgggttctcaatggtatttcaaagaaaatgaagaaacagaatttaattgaagaagcggatactatcgaagaattggctattcttgtagaattaggattacctaacataaaatcagttaaaatctatcaagcaggaattcgctcaaggatttctgcctatgaaattgccaacttatatgatgatgatctttgggaaaaaagcattagaacatataaacaagatttaatagaccatgctgattactataaaaaccaagtatcagaaaatgcagcattatggatcgatttattagtaagattttcgaagagaaaatttataaaaattaaaaaagttcctaacttcagatatggaaaagtacataaaagaacaaaaaggttaatggcaagaataattaatgataagcaatatttagttagtccgaattttagtgttataaatgaaataggtgaatcagatattgacttttctaaagtcagtaatattaatggaatttactttgattatgacgaagatgataaactttggaaaataacttgcatgaatccttatgtggtatttacgtaattactatatacttttgggaagagatgagaataagtatttagacattattagttgttaatttatcgctataaggcctattcttgaagcattaaacaaccaattacaaactaaaataagttttgattaacttgtaactattaacaacattgactatctttgtcgtagagagatatttgaaattatgcagagcaatgcaatgtgtagctggacttccactactatatcgttacttgcatctttataaaaacacttttaatcgctgatttataaaagattaaaacgaactacactcttttaatatatgaaacaaagtgtttcaaacctataaacaaagagtttcaagcgtatgaaacaaattgaaactgccgttaaccaaaaatcaggttacttattataggattaagaagtcaaaacagtcaacctaaatccggacgagacaatataatattctaaaagattagcaattatttccatatcgaataaaagcagtacatcatcaaaaatcgccggaacagatcaatgatctgcccggcgatttctcatcttaaaccaatctccacttactatatatcaatcaacgattcgggtgaatgtccaacttcaccggtttaatcatattttcaggttttaagatagtatccaagtcttctttggaaagaatgttatgttccaaaacaagttcataaactcccttccctgtttccaatgcttctttggctattttagtagagttcttatatccgatcaccggattcagggctgtcactactccaatgctgttatgcacatctctccggcatttttcttcattagccgtaatgccgtcgatgcataaggtgcgcaaagtgtcgaaaccattcatcagtaaatcggcggactcgaaacagcattgtgccatcaccggctccattgcattcagttccatttgagctgcttcaccgctcatggccacacaaaggtcatttcctattaccttgtaggccacctggttcatcacttcaggaatcaccggattcacttttccgggcatgatggatgagcccggctgcattgccggcagattgatttctcccaatccacaacgcggaccggaagccagcaaccgcaagtcgttacatatcttattcattttaacagcaatacgcctcatcactcccgaataacctaccatgcaggaagtgtccgaagtagctcccaccaaatcgtctgctagtttgatatccaatcccgtaatcttgcgcaaagcggcaatgcacttctccgcatattccggttcggcagtgattcctgttccaatggctgttgctcccatattgactgccagaaaatcctgtgcagcaaaatcaaggttctttatttcatgtgacaaaatacttgcaaagccattaaaggtttgcccaagagtcatcggtacggcatcttccaattgggtacgccccattttgatgacatgtgcaaactcattcgctttcttccggaaagactcgatcagaacctccaaatgcttaaccaatttcaaatgagtataatacagtccaatgtgaatggctgtaggataagcatcgttggtagattgtgaacggttgacgtgatcgttaggcgaacagaattgatattctccccgctgatgccccatcagttccaatgcccggttggcaatcacttcattggcattcatgttggtggtcgtaccggctcctccctgaatcatatctacggggaactgctcgtgatgctttccttcgagtatttctttacaggctctcaagatagcatccgcttgttcttcagttaataagtccagttcacggttggcaatggtggctcccatcttcgtaatggccaatgcctgaatgaataaaggatattcattcaaatgaaacttgctgatgcgaaagttttcaatgccacggagtgtctgtactccatagagtgcactttccggcacttcacgactacctatcaggtcactctctgtacgagttttttttgataaattttgttccatatcggttgttttatagtaataacgttttcgttagttcttataataaccaaccagcgatgttattgttttaataaatatgcaaaaactattcaaagacttttttgttgtaaatagaagaaaaagaaaatacaaagacaagaatcgcttatctttgtttttgaacttaaaacagcaatctatgatattacaattagcatttgttctgacagccattattattggcgcacgcctgggaggtatcggacttggcgtaatgggaggcgtagggttggcaatactcacgttcgtttttggtttacaacccactgcgcctcccatcgacgttatgttaatgattgccgccgtaatctctgccgcttcctgtatgcaggcagccggaggtttggactatatggtgaaactggcagaacatttgcttcgtaaaaatccttcacacgtcactctgcttagtccgctggtgacttacctctttacttttgtagccggaaccggacacgtggcttattccgtactgccggtgattgcagaggttgccaccgaaacaaaaatccgtccggaacgtccgttgggtattgccgtcatcgcttcccagcaggccattacagcaagtccgatctctgccgctaccgtggcacttctcggacttttagccggattcgacattaccctgttcgacattctcaaaattacgattcccgccaccatcatcggagtgttggtaggcgccttgttttccatgagaatcggtaaggaactggtggaagatcccgaatatcagaagagattgaaagaaggtttattcaacaataaaaaggtggagattaaaaatgtcaagaacaaacgttcggcaatgatttccgttatcatctttatattggcaactgcttttatcgtgcttttcggttcttttgaaggaatgcgccccagtttcctaattgatggggaaattgtcaccttgggaatgtcttctatcatcgaaatcgtgatgttgtcggctgccgcaattatcctgttagtaacgaagacggacgggatcaaggcaacgcaaggttctgtatttccggcaggtatgcaggcggtgattgccatcttcggtattgcctggatgggagatacctttcttcagggaaatatgggacagttgactctctctattcagggaattgtgcaacaaatgccgtggctgttcggtgtcgccctgtttgtgatgtctatcctgctatatagccaggctgccactgtacgggcactcgtccctctgggcattgcgttggggatttctccttatatgctgatcgctttattcccggccgtgaacggatatttctttattccgaattatcctaccgtggtggctgcaattaatttcgaccgtaccgggacaacaaaaatcggcaaatatgtgttgaatcattcgttcatgatgcccggtctggtatcgaccgttgtggctattgcactaggtttgctttttatacaaatattctaatagattcatattattaacctaaacatcattcagttatgaaacaattcaaaagctttggactggtagtagtcacactactgttttccgtaactatggcattcgccgcaaaaccgaatattcatattcttgctacgggaggaaccatcgcgggtacgggaagctcggctaccggaaccagttatacggcaggacaagttgccatcggcgcactgctcgatgctgtgcctgaaattaaagacatcgccaacgtaaccggagaacagattgtcaaaatcggttcgcaggacatgaacgaccaggtttggttgacgcttgccaagaaaatcaatgaactactgaaacgcccggacattgacggcatcgtgattactcacggaacagacaccatggaggaaactgcttacttcctgaatctgactgtcaagagtgacaaaccggtggtattagtaggcgccatgcgtccgtctaccgctctaagtgccgacggcccgttgaacctttacaatgccgttgttaccgcagccgcaaaagaatcgaaagacaaaggggtattggttgccatgaacggcctgatcctcggagcgcagagcacggttaaaatgaatacggtcgatgtacaaactttccaggctcccaactccggcgcactgggttatgtactgaacggaaaagtgttctacaaccaagtaacgctaaagaaacatactacccagtccgtttttgatgtcactcatctgaacgcgcttcctaaagtaggtatcgtgtacagctattccaacattgaggccgatatggtaactccgatgcttagcaacgggtacaaaggcatcatccacgcaggagtaggaaacggaaatattcaccagaacatcttcccggtactgacggatgcccgccaaaaaggtattcttgtcgttcgttcttcccgtgtcccgaccggacccaccacactggatgcagaggtggacgacgccaaatatcagtttgtggcttcgcaggaactgaacccgcagaaatctcgtgttttgttaatgcttgcactaacaaaaactacagactggaaacagattcagcaatatttcaacgaatactaaaaacctgacttacttatgaaaaaatggatattcatgctgctcctcgcgggtagcatacagggaatatatgctcaaaaaacagagaaaaaggagaaattcaatccgaacactcccctgtttgaagagctgacagacgtgaaaaagaaaacagataaattcaatctttatctgaatatgcaagggagctttgacgctcatttccagaatggttttcaggagggtgactttaatatgcaccagcttcgtatcgaagccaaaggaaatatcaacaactggctgtcttaccgctatcgtcagcgcctcaaccgctcgaacgatgcaaacggcatgattgataatctcccgacttctatcgactatgccggaatcggtatcaagctgaatgaccagtttagtctttttgcaggaaagcaatgtgccgcatacggtggtatcgagttcgacctgaatccgattgacatctatcaatacagtgatatgattgattacatgagtaatttcatgaccggattgaatgtgggttataacattactcccgaacagcagcttaacttgcagatattgaacagccgtaacagttctttcgataatacttacggaatcacagaggatgccgaaggcaatctccccgatctgaaatcgggcaaaatgccactggtttatacattgaactggaacggtaatttcaataatgtatttaaaacccgttggtcggcttctgttatgaacgaggccaaaagtcacaatatgtattattatgcttcaggtaacgagttaaatcttggaaaatggaatgcttttgtcgatttcatgtattcaaaagaggatattgaccgcaagggaatcattaccagtatcgtaggtcgtccgggcggtcataatgcttttgatgcgaactatctttcggttgttgccaaatgtaattaccgctttcttccgaaatggaatgtttttgtgaagggtatgtacgagacggcttccgtaggcaaggcgtccgagggaatagagaagggaaattaccgtacttcctggggatatctgggcggtatcgaatattacccgatggaaaccaatctgcacttctttgttacctatgtaggacgttcgtatgatttcacttcccgcgccaaggtgctgggacaggagaattacagtactaaccgtatttctgtaggatttatctggcagatgcctgtattctaattttaaagcaagaaaccgagctgacaataaaaaatacccgatagcttcttacaacagttatcgggtattcttatatgttcggtctttttaaatcaatactcttcctcgttaaagaagaaatcctccttactaggataatccggccaaatatcttcgatactctcatagatttcgccctcatcttccatctcttggagattctcaataacttcaagaggagcacccgaacgcatggcataatcaatcaattcgtccttggttgccggccagggagcatcttcaagttttgatgcaagttccaatgtccaatacataatcttgagtatttaaaatgaatactaaatttgtctcgttttctatttttcggcaaaagtataataaaatctatcatttccaactattatcccaaaatatttcattattttgctcatcaaaattaatttttcgggataatacaaacaaataatctgataatctgttgacaaatgctaatacttcgggagaaattgtacaagtttcggataaagccagaatacgtctctcggctctcctgcaaatagtacggcaaacatgacaaacggctgctccacgactcccgccgggaatgatgaaagcgcaaagttcgggcagttgttcgtccagcctatcaatctcccgctcaatattctccacgttttcaggagttatgatgctggcagccttcagttgcgttttttcctggtcggtggccagatgtgaaccgatggcaaatagcttatgctgaatactcaaaatgaaatcacggtctgattcatcctgcagataggtattcaaccatcctagatgagaatttagttcatccacagttccgtaagcttccagacggatatgggtctttggaacgcgacttccgccgacaagactggtagttcctttatctccggtctttgtatatacaaggctctttttcataatcttcttttttacttattataaggtaaacgtacaaaggttcttagaagttgacaatatactgctgttttatcttcgttttatcaaaaaataataaaccgacgtcgtagaggtcaaaggtgatgcctactctttcatcagcctgcagctttttccaaagtgctttcatctctttggaatagcagatgccatggactacaaatacacttttaggagtggtgcgatgtgcacaaactcggaagacttcttccagtaaatcgggattccggtagtcattcagatacagaaagtcgactgaagtgtctgcatccagaaacagttccgacaagtcggaagcaaagaggtaggaagccgatggtttagcggattgtaagtagagggttgtggaggaaggacgcccaacttctataatcgtagcaggctgcactttgttcaccaaccggaacaggaaacggtttaccttttgagaacctttagtccacccacgctctcttatcatctttttctgttcttttttcaaagaagaataggcatagtaaggcatcttctcataaatcacatcggtaatcagactaaaagcaaaaggggaatgtacgccatatccgcaacgataacgaaagcgggaaagccagataaaaggtctttttatacagagtagaagattcataaaacaatcattcgtatttttattctcccgacaaagatatatttttttattgaaaaagggtcggttctttatgggaaccgaccctcatactcatttattccaagttactactgtagtctgaatgataccggtacagtaaatttcactcgtactttcttaccattttgcactccgggagtccatttcggcatagaacttatcacgcggatagcttctttatccaaataaggatcaacccctcgcacaacttcaggattggaaatcgttccgtctttgtctacaacaaactgaacaatgacttttccttgtgaaccagtttcctgcgaaatcgttggatatttgatattactacttaaatatttcattaaagcagctgtacctccaataaactccggcatgacttcaacacttacgtgaataacgtcttcaactaccgtttctgtttctaccactgggggtatccaaataacgttttgaactgcattcatatcctctgacactgtagaaacgttatccgtcacctccgtattgttttccactatttcgaacaattctgttaccttagtttcgggaggaggaggcggttccagtttctcttcagggaatgtgattggaactagctctgttacaaagatggattcatcatctggtgatagtgctgcaactctgacgtcatgttgtgtccattcgaacgaaacgaacatgaaggctagcgcaacaaccaaacccatcaacaaccaagaaccccgttgattctcaattgcagccttttttgatttcttggcttccataaaaaatgtgtttaagtaattaataatagaaaatatatagtatatatactacttttcgtttttcctcttaagcattacttaaagtgctctctcgctgcaataaatataatcgttttatggataggttgttacgacgtctcttgtttattttattcttttctattcttttgaagaaaattaatggcttttcctctcctctttttcctcataaacttcaccggaccaacgataaatcgtattatctccacaaattaaatcatgaaatccatttgtcttattctctgtgattcctattcgggaatatccggtgtgatattctgtctgcttaccattaacagttatattaaaaagtaaagcatcccatctatcccaataagtacaatcaatttgatccattatcccatttccatcaaggtcataagtcattgaaattgtttcattctcttttccattatggaaatcctgtacacttatttcttttatcgtcgtaatagaattcttcttcgaggattccactctcacagctcttccttgttgcaaaacgaatcgttcacgtaactctacatttctttcagtgttataaccctcattacaatcaattatcaaaacagatagtttcccattccatctttcaatcttgggcgtttcatttacgttatttccaaactcattcgttattgtaaagaaacccgtaccagtatatttcacaaaaaagaaagaactaccgatagcattccctccacaagcctgtatgttctcaatcaaagcgtctttaattccatcaccatcaaaatcttcttgtgcgacaatatccatacacatatcagaaggaatatctattttatactcatacccatctacttttgcatataaattattatagaataagccttcatctgctttcccatagaatatgatatctacattattgtcaataatttgagaagcatcttttgatgtttcctcattatatttcggttctctagaagaattcaacataaagaacaatatagcagccatcacaattagcacacaggcagccagtatccattttccactaaatctgaccggctttgactttataaatcgctcttttaatacgtcatagaactcattaaaataatatctattatattccggtccatttttcttcacaactcccgacacatctgaaggcaatccctccggaaacccctttactcccgataaaaagacaggaattatattcttattttttgctaaagcatacgctagttcattcctcaaccaatctttctgaggattaaagttcacatctaatgtacgttcaaaagctttttcatcaacaattaaaataaaatcttcacactgatctatgcgatttaataactggacatcaaaatccccattcctaagggtatcaatatcaaaactaacccgataaccatcacgtactaaaagatcattgagatgtttagccgtgtcataaccgccttgacgacgataactaataaatatatcaaaatttttcatttacaaactcttattgtatggcattattcaaaagttggaatagcaaaagttgtcatattacggtagtaattatattacttcaaaatatcactctcgcaacttaatttgtccacatcaacatcattcggtacaaagtaatcaaaactgcatttcgtgaatgagctttgccatattacagatttacaaatatcatcaacggtctctatagtaacgttaataccagctccatacatcgggcctctgcctttcacgttcataatccaatacataagatcatctgtcgcagtatttgtagtttcgatttcattcctttcctcaacaaagtagaaaaagcagatttctttaccagtcaatctgtcgattcttcgagcatcgtctactatttcctttataatgttcttgtcattataatcaaagctacttacaaaaattataattttgctggtgataaaaccaatcaagtacttttttgaattttaatggtgttatatacataacaaaaaccttcttaaatgatattgattttatgattcggttcttatgaatttagtatgagcaaacatttctgtactgctattttttatatcccaatattgaatctaaattgtattaggactcatataattaaataccataaaagcgatggtttaataaaaccatcgcttttaactccttacaatgcctgtccacattccgaacaaaattttgcacctttgatattccgatatccgcagttcgtacagaataccataccgttaatatccaaattcagagttgtaaaagaatcccgattttttagcacctcttcagctatttcgagcgccttatcatcaagtttggactgttgtactatcccccaaatttgcgtgataagtaccggccagaagaatagcatagaaatgatagtaggaatagcttgttgaccaaagatccctatcccagcctcaaacgctattgcattatctttaggtatcaagctgactttcaatgcagacttcaaaccaagtacagctttaaataaaccgccctttgatatagaaatatcaacaccaccacttaataaattatctatttgtacctcaaactgctcggccgcaaattctgtttttatttgttcagcaataacaggaatcaaagaaggattaccctgaagtatcttttttgttgcaaatgttcccataattctattttttaaaagtgtaatgactgtaatgcatgatattggctcgttgtaaataacacaccggcttcaacaagcaattctttaatttcacgctgttgctcttccgtatagttcttttccatagacttcaatatagaaacaattctttcagactgttccttgatctcctgttcagtaactataccatcttccataatcttcttgaatgtaggctggttcatgaccgcctcgtctaaattcaacattccttgttcattaaaaaacataagctattatatttaaagtttatttccacaatgtttgcaataggtccaactatccactatcggttgtttgcaattcgagcataccttgcctgatttttctgccgaaagatgatctactatagtcttatattgagaactttttccccatttcaagatttccttaacccgcacagccgagaacggatgattctgattcattattgccgctacctgcaatgtcttattccataatccgtcattacggatagcctcatattggtctgcctgtttagcccactcctccatatcgatattctttgttatagaagtcggacctccggatagacgagccatcgtgcttgccactatggccggagtagtcacaatactggcagctctgtcacaggacaactcacttttacgttcccaatacaaaatcgcatattgaagaggagctcccaaactccccaaaacgcccagcgaatccagaccatccatcacataatgagctatagaatgatacaagacatgatgacaaaggatatgcccgcattcatgggcaatcactgcatccaactcctcttcggtcatcatatcaaccaaaccggaagtgatcgttataaaaatctttgtatcgccaaaggtccatgcgttaggattaggatccatagagagatagaactccggttgctcaatacccaactttttacaaatcggtggcagacgattatacagtttcggcaattgactcggtgataaacgaattgcagatgccatattaacgccatattgcagttgttccaatcccattgacattaactttttcactagggtcgggaatccgggaatactttccaactgcctcaatgcagctgcatcctcaggatgaataaaatctgttgctttaatcatggttattaatatctaagttttattactttattgttgtgagtgcttttcggctttatcgcagccatagttcatatttttttatttaatacctgtctcatatttcaaattaccacattcattgcatacgatacaaatatacgttattaaaaaacgcacagaaagtgtccaaatgaataaatatattcatttggacaaaaagtatgattatacttctcaaaaaagtgtttatcctgcatttttttatttacaactactatttatactcagaaactcggatatttttctttgagcttcctcaaaaaaggaggggtaatctgtaaagtttccacagcgttaaagggaggaagcaagacacaattattctcctttatcagtaccaaataacttatattcaaaataaaagattgactgatttgtgtcaaaaaaggatgatagtttaatatcatttgtgagtttacactccttttcagttttaaaacatgcccatcatacaacatggcttcccattgtcttccttttgaattatagcgaaaatacccgatctctcctaaacgaattaattgcaaatttcctgttgcagtcgtacataaaaagatatcgttctgatccccgactacagaaaaaatccgtatagcagcaaattcactgcctgaaataaaatttctcaatattttttcccgttgactacgattattcgtttccataatatacttctattttttatattttctactcccaaacaactacactcaatacaaatcaaccgcttcattacggataacagttcccttcctgtctatgataacacttgaatagctatcttttaatgtacataaaaacaagtctttgctaatagccgtaatattatcatataaaaccggagttataggtttaccattttgtcccatcagaccatagctattgtacacactataactatataatcctgtcggtttcttaatcgtctcccctccatctttcgttttttcaaagctgtcatattccaatatggtaacaccactataaatattctcattcaatacttttccatcataaccaatctgtacctgacttccatcttgtttatcagcaatcatataatgctccaataactggatatatttatattctgcaggaagaagtatctgtaaagagtcgtcaagcacaccactaagtttgccaacatcaaatattctctttccatattggggagtatgtatacaatcataagaaggtcccaacacccatttacccttcttgtctattactccgcatttacctgacatatcgtacatgctactatatccattacgaaaaacaaatgccacactcttcgcattatctttcaaataaggaaattgaaaatcgattactgtctttccttgacgatctataaacccaaccttttcgctcgatacaacagcagccaatctctcggaaaagacccaagcatgtgcatattgttccggaatgacagctttaccggtgaaacgattaaaataaccacgtttccggttcttcgagaaaaccaccagtgtgtccctacaagactccgaactcaataaccaatcaatatcttggatcgtagtttttcctgtaaccatattctcaatcctatatttcccatcttttatataagagtgacactcactactatagatatcacctagatattctgaactcttacgcgctgcgtaaaattcaacactcacaagaatacttacccagcatacacataacactgcaataagaccaagaactcgcccaaatgtaattttctttaatgttttcattgtttcatgtattattttcattacccttaaaaagagatttatctctttatgaaatatcaatctttgtctcttcaccatttatattgatatagatgaagagtaagaagtaaatctaacactataaataaaaaacttttctattgatagattatagactaatacttcatctatattagaaaacaactaaaaacaagaattattaatctcatcattttagatgattatgaataagaatataaaagaaatgggagacggcttctatatcgtgacagaagagggaagcaacggaatgggcggtttttgctggcataatgttgaactccgtaaacacgacgatccatctttttgcgcagaaatacttcgcaatcaacaattcgtgaatttcccaggactggctcatggtaaatgggaaaaagacatcgcgatggaacatgtcattaaagaaaacagattcgctagttttatctatccatttgttgatgataaggctgtattcagttggacagtacaacctgacggaagatactgggcggatgaagacggctatgggatgacagatgacaatcaagtcaccctatatgcactctttaataaggaagggcgttttattacgttattttccgatcaggttcctgaccaaattaattacaaaaagatagtccacaattagataaataggcactgtccacgattttgtgtaaatagaaaactagaggattcgagttttatacttgaatcctgttttcaaatatagttataaattgattaaaaatcaatgcccaattccaaataggttgataccatttcttttctatttctgtaatagccagatacacagactttttcaaggcatcatcatttgggaatgatagcttgtttttggtgtactttctaatttttccgttcagattctcaatgagattcgttgtatatatgatctttctaatttcaaccgggaagtcaaagaatacggtgagttcttcccaattatttctccatgagcgtatcgcatatggatatttagtcccccatttttgctcaaagttctccaactccatctttgcggcttctttagtaggtgcattatagatattctttaaatcagaagtaaactcctttttttctttccagaccacataccgacaggagtttcttatttgatgcactacgcatatttgagtggtagatgttggaaacacactcttgatagtttctgtaaatccattcagattatcagtaaccgtaatcagtatatcttctacaccacgagctttgagatccgttaaaacgcccatccagaaggcagcgctctcatttttaccaacccacatacccaatacctctttcaagccttccttatttagacctacacataaataaacggtcttgttgatgaccttaccattttccctgactttaaatacgataccatccatccagacaatcatatataagctctccaaaggacgattctgccactctgaagcagcctggctgactttattggtaataatagagatagcggaggtggaaagattgataccgtatatttcttgcatttctgactcaatgtcagatacgctcatgcctttggcataaagagagattacaagacgttcaatagacaagccacgggattgatgcttagggactacaattggctcaaattcactttttctatcatggggaacctgaataacagattctcccatctctgtttgaatctgcttcttataactaccattgcgggagttgccactatgatcgccttgattggagtgtttctcataacctaagtggttatcaagttcagcttccaacatttgctcatagacacgagtatgaagctctttcatgaaagcggtaacatcttcacctgtcttaaactgagacaggaactctttacttaaaaattctttggggatgtccataaaatctgcttttttacaaagttaatatataaataaaaaaaactacgagaagaatcccgtagttttctatttacacaatattatggaaagtcccgataaatataactaccgcaactttttttgcttgtggcttctttttaacttcacattctccattagctaataaaaattcgttccacctaagttgaatatatgttttcaccttaaaatagagaacatacatccaactttagtagaacgaaaactaaaatgtagattaaataaatatttatgaaagaacaggaaataaacatagcctcataacagacaatcttttataatcatccatatgataagtttagcttaaattcacagtacttattttgcttttttctttttcttcgcgttatctttcttacgcatatcctgatacttcttatattgttcatcggtcagaatgctttttattttagcatcgacttccttctttttcttttgcatttcttctcgtgaaggtttttcatccgatttattttttgcaggtttcatctcttccattgcagctttaaaatctttggcctgcttttcattcagtcccaaatcggtaaccattttttctatgcgtttctctctatcagcttttcctttctgatgattttgagccatacatacagttgagccaatcaatagtgcaactgccaaacttaaaatttgctttctcataattctaaatatcatattaagtgagtaatgtatgttagacctcacaaaagcttgaaagttaattctacgatgaaaagaaaatctgcttttttacattatttattgtttctccacattataaatattcagccggatatgagtgtcattcaattatttccattactcttccctacctcctcctagtgcctgatacagattgattattccttgtatctcctgaaaccggttactcacctgtgtcaactgtgctgtcagtagagtttgctgggcggtgaggacttcaagataagtggaatttccatgttgcataagcagctgtgtgctggtaacagccgtttgtagagaagagatctgacgctggtaaagatcggatttatcccgggccgtttgattttgcttcaaagcattgttcacttcagcaccggcattgagtagggtctgcgtgaaagacaacttcgcttcttcctgttgcgctttagcaatttttagacgggctatattctgccccttattaaataagggctgcgtaaggaagccaacagctgacagcaacaacttacccggattcataaccacctcacctactccatttgtccacccggcagaaccgctgagggtgatggatggataaaaggcagagcgtgcctcattagtcgtgtaaaaggcttgcgctaaagccaattctgatgatctgacatcaggacgattagcaagaagttgtaaagggatacctacggataaatcctgtggcaaaacctgtccgtccagtgtgccacgacggataaattgcggagtttctcccagcatcagacaaagactgttttccgcctgcctgatttgttcctttagatccaaaacagtggtacagatggaatagtaggtggcttcggtttgtgccaaacctgcttcgttaccttgaccggcatttttcagagcttgcataacgcgtacactttctttccattttacttctgtttcctcggagatggccaattgagcatccagcattaaaagtgtgtaataggtattcgccagattggctatcaattgtgtcttaacagcgagttcatattcctgactttgaatataaagagctttagcacgacggttggcattcgtcagccgaccgaagatatcaatttcccaagaggaagtaataggcagggaatagctctgtccagctttccccttatcgaaactacttacagtgccctgcggtgaaaaagcgaatgagggcagataagccaggcgggccgaactaagcgaagcacgggcttcttccactcgccagtgagcggactgtagatcagtgttattccgcaacccctgctcaatgagggattgcagatgaggatcgacgaacaattgacgccaattcaacttggcaatattatgaattgtatcagaaaccgtttccgccgccccaaaaagatcttcggggacggtcgttgccggttgatattttgtatagatgccgcaactactcagcatgagcgtcgttatggcaagggtgatgatatttcttttcatttcttcttattctccaaatattgttttctttcttcatcggctttctccacctcttcttttatctgccagtcagcaacagtggcatcaaactgaatcggtcgcactttctcctgtattgcctggaagacaataaacatagccggcacaatgaataacagtgccaatgtacccaccagcataccgcctaccacacccgtaccgagtgaactgtttccgttggctcctacgccagatgctaacatcagaggtaccataccgaaaatcatagtcagcgctgtcataagaataggacgcaaacgatctttagcagcaataagcgcagcagacgtcagactcataccggcacgacggcgctcggtagcatattcggtgagaagaatagctgtttttgccaacagaccgataagcatgataagtcccgtttgcagatagatattattttccaatccaagcaatttggcaaagaggaagctacccatcaatccggccggaacactaagcaggacggcaaacggaacgaagaaactctcataaagcgcactcaatagcagataaaccatcaataggcagatagcaaagatcacgatggtggtattactctgattgctctcctctcgcgccagtccgccaaaatcgaaatcatagttggcgggaagcacacgggcagcagtttcctgtacggcacggatggcttcacccgaactgtacccttcggcaggcatggcattgagtgcaatggagttatacatattaaaacggttcaggctctcggctccatatactttggtcagtgtgacgaactgactcaacggtgccatctctccattgctcaagcggacaaaatgacggttgagcgaagcctcatccaaacgataattcggatcagcttgcaccatcacacgatagacgcgcgaaaagcggttaaagttactgacatagctacctccataatatccccccaaggtagaaagtacctcatcaggcatgattccggcacgcagacacttagcagcatccacatcgacctgccactggggatagttgatttcgaaagatgaaaaagccattgccagttcaggccgctgattcaacgagtcgataaactggcgagtgatgctgaaaaactctgtgagatcacctccagccttgtcctgcatttggatatcgagcgcattacccatatcataaccaggtatcatacccggagccatggcaaaaactgtggcatccttgatatctccggtacgggcataaatctgtccgattactgcctgcacatgatcttcttcctccggtcgttcatcccacggagtaaggcgaacaaagaaaataccggaagaattacccgcaccacccattgaccaaccggtcactttgagtacctgtttcacctgtgggatttgctgaatacgttcttctacacggttcataatgccatcggtagcatagagtgagttacccggcgcagtggatacggcaacaaacaccagtccctgatcttcatcgggcacaaggcctgttttggtgctgttcatcaacaaggcaaggattacgactgtcccggcaacaaaggcgcctgtcaaccatttgcgacggataaagaagagaactccttttttataccgctctgacaatgattcgaacgcagcgttgaacgcacggcggaaacgggctgcgaagttttgcttctgtgtgccgtcctcattggtatagggtcgcaaaatcaaggcgcagagggcaggacttaatgtcaatgcattgatggtagagatacctaccgccacagccattgtcagcccgaactgcgtatagaatgtacccgaagtcccactcatgaaagacaccggaataaataccgccataaacaccagtgaagtggtaacgatagcacccgacagtcctttcattgcatccacactggccatatagggcgaacggtagccggaatcaaacttggattgcactgcctcgaccacaataattgcatcatccaccactgtaccgatgaccagcactaatgcgaaaagtgtaatcaaattgatactgaatcctaccaacgccatgaaagcgaaagttccgataagagaaacaaaaatacccaccagcggaataagtgtagaacgaatgtcctgcaagaaaacatataccacaagaattaccagcagaatcgcttcaatcagcgtctttaatacctcatggatagaggcgaagagaaattcgttggtactcatcagctgggttatttccgcccctttgggaagacgtttggaagcgtctgccagaaaagcgtcaatctcacgattaatctctgtggcattagaaccggcagtctgataaaccatacatgacacaccgggtttaccattgaaactaccttgataagaatacgattcttgtccgagactgatgttagcaatctctttcaaacgaagtacctcaccattcttagtactgcgaatcacgatctctccaaattcctcgggagtcatcaatcgaccgcggtatttcatggtatacgctttagcttccttggaattctcaccaatggagcctgttgcagcttcaatgttttgtgaggccagtgcggcagtcacatcggaaggaatcagtttgtactgcgccatgacgtcaggtttaagccatacacgcatggaatagacaccacccatcacctgcacatctcccactccggaaatacgcaagatagcaggtttcaaattaatattgatatagttcgagagaaagttctcgtctaatgagctatcaggactatgcaaggtaaatatctggagcataccgttctgtcgcttgttgacactgacacccacacgggtcacttccgcaggaagttgtccggcagcttttgacacacggttctgtacattgacagcggccatgtccggattggtaccttgtttaaagtaaatggttatttcggctgaaccggcattggaagcactggaagtcatataagtcatatcttccacaccattgatggcttcctccaacggagcgatgacactcttctgcaccgtttcagcactggcaccgtcgtatgcagtgtacacctgaacggtaggaggggcaatatcgggatattgctccacgggtagggtgaataacccgataatccccaccactacaatcacaatggaaaggacggcggagagcacgggacgttctataaatattcgtaagttcattgtttcttcaattttgagttagttacttcttctttgttatcggcattccatcctgtagtagtccgacaccttctgtcacgatttcatcccctacggcaagtccgttcgtcacgatgtaatcctgtccaccgtccacacgctccacacttatttgggtagaatgcgttttgccatccactaccttatagacaaagaccttgtcctgcacttcgtaagttgctgcacgaggaatgatgataccgtccttgtagaccgatggaaccaccacatttcccgaacttccactatgtagcagtccgttcttgttggaaaatgcagcccgtacactgacggttcctgtcgaagcatccactactccgctaatagttgctatggtacctttttcttcgtaagtagtccggtcattcagcactagctcgatggcaggcatcgactgcaaagccttgtctttagaaccatattggcgaataagccctaagagttggttttccgtcattgagaagtaaacatacatatccgagttgtctgatacggtagtcagtggttgtgccattccggcactgacaagcgtaccaacgcgatagggcaatgtgccgatcactccatccgagggacttttcacttcggtgtaggaaagatcattggcagcactcaactcctgcgccttggcttgtgcgcgtccggcttttgccatcaacagattattctcggccgttttcaattcataagccgaaatgacgttttgagcgaagagttctttcttgctatcgtaggttagttgtgccgtagccaatgtagcatcggctgcttccatattcgcccgggctgtggccaaagctgcctgataaggaacctggtcgatgatgaaaagcacttgtccacgtttcaccgcctgtccctcgtttacacacaatcgggtgatggttcccgtcacctgcgggaagatagcaatatcctgcttaccctggatagctgccgggtattgggtagaaagagttttattgactggtgctacctgcatcgtcgcatattccggtacagactgcgaatattctcctccgttcttgcatccggcaagagtaaggagtattgtcagcatgaagatttgccacattttgtttgtttccattttcataaaattcaatgtattatagtgattgattagttttcacaagagcggtgcaaaagtaggtgtcagcaccctctcccgcaatgcaattctgatcaaagccggatttttgggggacgaaaccgcagagataagtggtgaaacggaatgaacggagcccaatatctattctcccaatataaagttgtgatgaagatgtaatgctatttggtattatttactacttttgcccaaacaaagaaaagagtccatcctaatagatagacttgattacgccgttatgataagaaaacgtatttatctcacagccgcaatattcctgcttgtggtaagcttttccgcttactacctctatcgtgtgaaccgctctgcacgcagccgcctggagtatgccaacggtctcattgaagtgaatccgcgaaaagcactggcagatgtggaacagataaaccgtactttcttgagcgaaaggaattacatgatgtgcgatttagtaaaagccggtgctctcatcggcatgcaggaatatcttgtgccggattcgctacttaacatcgtcagcccttacttcaaatataaagcggactcactacacctgactgaaatatattactaccggggcgagatagcccgtcactctaatttcctgcttgaagccgtagaatatttcaccctctgtacacaatacaacaacgatgtgtacgatcttcgcgaactgaacttctacctcaacaacttcaaagggcaggtttaccacactaaacacatgatgaaagaagagaaagaggccaaactcgccgccctctctctggccaaggagctaaacaacccctctctcattgccgaagcctactctgaactcacccactattacgcctggacaaatgatggtgatgggagtatccctctgttcaaaactgcctctatgaaaggttactctggctccttgcaagcccggttgctattcctccgcagtgaaaaatatgccgacaagcacatgcctgactccgctcgtatctatgcgctgcaaatcccgcatttatatcaggactcagtcgactatctgctcggcaagatacattccgatcttcaacaaatcgattccgctcgtttttacctaaaccgaagcagtcagagcaacaaccccttcatctgtctgaaagcctatcgccagttgactgatctgaatatacgtaccggttctctcaatggtgtatcagactgcttggaaaggctgacgcactatcaagcacagatagacagcgtcgcttataacaaggacctcgctcaaattgagaatgtggacaaacttcgaaaaacgatccgtgactccgaagtcgcagaggcagaatactaccggtactgggtcttctattgctggattattgtcattgcttttaccgtcatcctcattctaatgtctatctccattgttctgcaaaagaagaaaaaaaatctgcaactgaaacgtcagcaatcacgtcttgatgcactgaagatgcagatagacccgcattttatattcaataatcttagcatcctgctcgacctagtagagacgggagatgccacagctcccatctacatcaaatgtctctccaaagtttaccggcatatcgtagctaatgtcgataaaaacctttcatccgttgctgatgaattatccagtttggaggcttatatcttcctactcaaaatacgttttgaggatgccatacaggtagaaatacaagtacaggacgctatccgcgagagacagatccctcccattgtattgcagatgttactggaaaatgccatcaagcacaatcaagtgtcggaagaagcaccgctattcatccgtgtatattccgacggggataaattggtagtggaaaacaactgtaaacctcttactccgaactcttccacccaccacatcgggctgcgaaatatcaaagagcggtatcagctcactggtgctcccgcccctgaaatctatcaggatgaacacatctatcgtgtcatcctttcaacgctttaaacgaaatgataaattccatgaaagttctaataatagaagacgagaaccacagtgccgaacgcctgcaacgctacatccgcacactgcaccctgattacgaaatttccggcatcaccaagagtattgtccaaagtatagatttcctccaacgggagcagccggatctgatattctccgacatccgcctacaggatggattaagtttcgacattttccgccaaataaagatagtctcgcccatcattttcaccactgcctatgaccagtatgctatacaggcatttaaattcaatagtatcgactatttgctgaaacccatcgactcggatgaattggaagcggctatacaaaaagcgacagaaagaatatcccgctcatctcctgtgaccactgctccaaagctggaacagctattggaatacctgggtggggctgtccctacccctcattatcgggaaagatttttggtgtctcgcaaagatgaatatatcactatcgaagtccagaacgtctgtttcatccactctcaacagaacataacccgcctttatctgacggatggcatttctgctaccattccttacacattggaccaactggaaaaggaaatgaaccctgcttctttcttccgtgcaaaccgtcagcatatgatacaagtgagacatattaagaaagtcagcaactggttcaactataaattaaaggtagaaatgaatgggtatccgcaggaggaaattttgataagtcgggagaaagctgctacattcaagaaatggctggacaaatagcgactggcttgctctaaatttattgatgacatcaatgatttgctgcagtgtcctacccaagacttcattcgcctgaattggcttccgcttgagattttttggggggctacccataaaaaatagctgaaaatcatatgattaacagctattttaagtacccagacccggtacaagccatagaaatcataggaaaataaaagaatttatcttccttattatcaactatttgaatatttcctattttctctatttttgccatattttgcccattttccgttattcagtacacttttagtacactttgaaatatcattttcttttgtacctttgcaatatcggaaaacaaaagaaaatcaactatttagcgtaatcacccggttatggtacctaaatcgggataaaacctctaaacaatggcaaagttagaaaataaaacgaaagaaaaccccaagttagagcaaaataagctctcggatggtagaatcagcctttacttagagtattatttaggtagagaggaaaagcccgtattagatgaaaacggcaatcaagtgtactatgatagtggaaagatgcaaggtaagcccaagtttgcagtaaagcataacaggcgaaaagaaaaccttagtctgtatctgatagataagccccgtacccctgcggaacgccagcagaacaaagaaacattggagcttgccacaaagatacgtgcggagcgtgagcaggaatttaaagaaagtatgttgggctatcggttgaaaaaagatagaacggtcaatttcttagactatttccaagcctatatcaacagttataccaagaaagatattcgcatggtacaaattgcgcttagccgttttaaggacttcttaaaagagcaataccccatgaatgagtttagtatcaaaccggaacttatcaccaaagaaatgatggagcagtttgtagcctatttgcaatcccgaagtgtgggtgaaggtgctaaaagcatttaccagcgtttcaagaaagttattcgatatgcgattgaccacgatgtaatgttgaaagacccatgtaaaagtgttacctgtaaagtggatagccaaatgcttcgaaaagatgttctttctcccgaagaaatccaaaagttggcggcttgccattatgacaacgagaacccgaatgtcagacgtgcttttatcttctgcttatactgcggtctgcgcttctgtgatgtaaaagaccttacctataagaatgtggattacgctaatcggttattgaagtttgagcaaagcaagacaaagggacattctgccagtagtggtgtggttattcctctgaatgacggtctattgtctatcattggtgaagctccggtagataaaaactgtttaatattcaatttgcctacttacgaaagctgctgtaagtcagtaaagcgttgggtaaagagagccggaatagacaaacatataagctggcattgtgcccgacattcgtttgccgtgaacattctgaataatggggcaaatatcaaaaccgtagccagtcttttaggacatagcggattgaagcatacagaaaaatacacccgtgcggtggataaattgaaagaggaagcaataaacagcttgcctgaactaaaattttaatcataaaagacttatctttgtaactatgaactttgaagcattagtaaaacatatcagcacgatacagaatacgttgcaggcacaagccgcacacgctgtaaaccttgcccttacttcccgtaactggcttatggggtgctatatcgtagaatttgagcagaacggagaagaccgtgccgcctacggtgaacaactgttgaagaagctggaacaacaactgaaaacaaaaggtctgaatgaacgtagattccgtgaatttaggcggttgtaccttatttatccacaactaaaagaacctgttacacaatatattgcatcacaaattcaaattcggcagtcattgaccgccgaattcacagaaccaattcggcggttagtgaccgccgaatctgaaaatggcgtttggaaactatcaacagaatacccacaaaccgaaacatggatgattccggctgatagattattcaacagattatcttccacccatttaaacactatatcgggaattgagaacccggtaaaacgtgctttctatgaaatggaaactattcgtggctgctggtctgtaaaggagttggagcgacaaatcgcatctttatattacgaacgtagcggactatccaaaaacaaagaagccctctccgctttagtccagcaacaagcaaccttattacaacctaaagatgttatcaatacccctgttactttggaattcttagggttgaatgaacgtgcattagtgacggaaaacgatttggaacaatccattcttgacaacttgcaacgcttcctattagaaatgggacatggcttctgctttgaagcccggcaaaaacgcatcttgattgatgaagattatttctttgccgaccttgtgttctatcaccgtattttgaaatgtcatgttattgtagaattgaagatagacaagttccaccatgagtatgcttcgcaactaaatatgtatctgaactatttcaaagcggaagtgatgcagccggatgataatccacctatcggtattctgctttgcactgaaaagggagatacattagtaaagtatgccacagccggattagacccaaatatctttgtacagaagtataggatagagcttccaacagaagaagaaataaaagagttcatttctttctcaaactatgagagttacaaactttaaaattggcgaaaagaaaaaggttatttcttctttcgccagcatatactttcagtcaatagaaataagtttagttcgttttggatatatatacaaaagcacaaactaaactcacaataaagtggattaaaaaaagagaagatgttttgataaagtcaggaatctatttttgctttttgagagaacaactcacgaagttattctatatttcaattgtaattagtttatagtatggaagattttaactcacaatatgccaaccattcgaaattagaacagctaaagctgttcattttggaacatggtacttatatcgaactcaaaaagggcgaacgattcactattcaaggcaaagtgaatcatcggggagcttatattgaacacggcttattgagatatactcgtgtggatgaaaaaggaaacatacacatagtaggatatactttctccggagaatttgcaggaagtttatgcactcttataaaacccaatcaaccgtcattagtaacaattgaagccgtttgcgatacaaagatttgttatatgtcctattcaaaagtggaggaattctttgctgcaaatgtagaaaccatgcaactaaaatgtacgcttgttgaacaatcatacttattaatgtatcatagattaatggatatgtactgcaagaccacagcagagctgtatcttgacttattgaatagatgccccaatattcaagagtacattacgttaaaggagattgcttctttcttgcaagtcacaccggaaacaatcagtcgcatacgccgtggactgaataaataacttacgataatgaatgattttaatacatatctcaacaatttggactattcccatgtaaaagatttatttgcgaaaaaagggatattgcgtacttaccataagaaagatttctttatccagcaaaatgaggtggaacgttttgctggatgggtaaaacatggcacatttcaatatacgcatattgacgaagaaggagaagagcacattgtgggatatgcttttaccgatgaatttgtatgtgactattcttcttttatgaaaagttgtctgtcagcagtgagcattcaagcgttaacagactgttctgtttatgaaatatcacgccatgatattatagaatgttgggaaacgaatatggaaactcaacgattaggaagatatgtagctgaaaatctatatgaaatggtgtatgaacgattgctcgattcgtattgtacacctgaaatacgatatcaaagactaatgaaacgttgtcctgaccttaaagatactgtacccttgaaaagtatagcttctttcttaggggttactcctgaaacagttagtcgcatacgccgcaaactggagaaatagccaatcttttaacatccattataccggggtcttgacaattgtcaagaccttttttctttattcttccgtattttgcattcatgatttaataacattgatatgatacgtaaattaacacaagaagaagaatataataatgctgctgatttgtcctatcaagtatatatggaatgtggcaggaatgatttcacccaagaaggtattgaaacctttaaaagtttcttgtatgacacatcgttgatgaatacacttgacatatatggtgcttttgacaatcatttattgataggaataatcggtgtacatcaggaaaggcaacatatatccctcttctttgtcttgccacactatcatcggcaaggaatagggaaatcgctatttgactatatgatgagcaattgtaatttcacttatataacagttaattcttcaacctatgcagaaactttttatacatctttaggcttcaaaaaagtgggtgaaaaagagattaataaaggtagtgttagtatccctatgaagagaaatatataattattgtcaatcacttaaaatagagataagatgaaaaggaaaattactttatgtatggcgctttccacattcattatttgcgccatgttatgtctgacaaattgtggtaacgatgatgcccctacttctgtcttcacccccgaagccctgaagcaaactacttggcaagcgcaaatgaccgtgtacaatatcaaagatgagatagactacacaaaacaatccattcttcagtttaccaacgaatcaaaaggcatttatacaaggacgaacgaagaagacggatatatgtggaacacagattttacttaccaagtaaatggaaaaatcatcacgttcgacaacatagcaggtccatggacagtgctggaatacacaggaacacacctcgtaatggaagcctataatcccaataagatggtgtggacattgaagaagatgtattaacggataaggcttaaatgaagtgtggatgcgactaatcagataatttcaaacgtttggaaaacagcaatatttttgttgttttttttatttctcgcccgtccagtcaatgcacaagtacaaaacgggtggactccaaacgattctgtccgattggctaaaatgctgaaaggagaaatgcctatccatattgatgatgcttttaaaagggaattagaacagtctattattggtcattcgccaaaagacgataatagatactgggatgattttaggttagatattgattttaaagaagattttccgaatgtagcaaatattgggtgcgccacaacgtttcacaataaattaaatcataacaataatctattgaatggaaatctaaaatgcaaaagccttatgttcaatagtcggatagataaaaatctacctcttataaagattcaacaaaatacaaatatggctattcctttaaataagaaactatattttagtgtatatggaaactatacactggataaaaaacggagtgtgatacttcctgcaacttctatcccttatcagataggagcaggattttcatatgagataggcaaatatgtcactattaaatcccaaacgaactaccaatataacataatacaaagaagatgggaatggttctttggtgcaggagtttcttttatcttttaatagttttgtaatcaataaactgaattcgtatgatgcgattaaataaaataataacattgacatttttccacctatttttaggttgctatcaaacagtcgcttgggggcaaacgattaacggaaaaataatagatgacaaacaactacctatagacggtgcgactattattttgcaagcaatggattcgacctatataggcgcatccatttccaattccgacggcatattcgtttttaaaagccaacagaaagaataccgcttgataatacaacaccttttatatgaaactaaacaaatggtaggtaagggaaataatgctggaactattcaacttcaacctcaagactatgctttggatgaagttattataaaagcagaacgtccttttgcaaaagtagagaatggacttttaggatataatcttgctgttcttacccaaaatcaactcgtaaacaatgcttatgaagcattgacaaagataccgggagtacaagaagatagaggaatactaactttggctggagcaggaaaactgactgttattttaaatggcaaacctacaacaatggatgccggacaacttgaaacaattctgcgcaatactccggttaatcgtgtggaaaaagtggaagtaatgtacagtgcgcctcctgaatatcatgtacggggtgcagctattaatatgattttaaaacattcaaacgactactcttttcagggggagataagtgctaactataaaaaccaatatttcaatgatgggggaatgaatggaaactttcgtttatcaactcccaaaatggcttttgatgtaatgtacggagcaaataacgtaaaaaagatggagtacatagaccttgattccaaacatacactaaaaggtgaactacataatatcatacaaaatgaacagttgcgtagcaagtactggaaacacgaccttagagtagcttttgagtataacttcaacaacaaaaacaatatcaatatagcatacacaggtagttataccccagaccagtataataatagccggacatcaggcaattaccaaaccagcaatgtcgataaatatattgacaatcaaatgcgcaatattacattgcaatatcattcaggcttcggacttgacataggtggtgattatacatattatacttctaataatgcccaaagactatatgctgattatcaagatggaagtcagagtagtttctctatggtgggtggacaaaaaatagaccgctactctatctatgcagaccaaaaacaatctctatcaaaaggatggaatctgggttatggaatttcctatcgatttgccaaagaccttgattttcaaacttatgataaagtgacaggtaacattcaaactcaaaatacatattccaatctaagagaacaaactaccaacttttatgtatcattgagcaaaaactatacaacaggtacatctttatccgtttctgctacgggagaatattatactattggaaattatcataaatgggcagtttatccacaagcatcgttgacttattttaaaacaccgaaacatgtgtttcaactttcattatctacggacaaaacttatccaagctattgggatatgcaatcttccgtcagctatcttaatggatatacagaattatggggaacaccgaatttgaagccaatgacgaattataatctgaatggaagctatatttttttgaataagtatattcttagcctgtttttcacgcatacatcagattatttcacacaagctgcctatcaatctactgacaggctggcactaatctataaaaatacaaattggaactatatgcaggtgtggggagcaaatatcatattaccctttaaagtaggaaactggctggattcccgattaaccttagtcggtatgcaaatgcaccaacgctgtgatgattttttcgacatccctttcaatcgtaagaaatgggtatttagcggcacactggataatacatttaaagtaaataagaatttgtctttcgagttaatgggaaatgtacagacccccgtcatacaagggacatttgatatagaatctatttttaatctcactgccggattgcgatggaatttcgcaaatgataaattgagtttatctgtccgttgcaatgacatatttgatacagggatgcctgcaacaaaagtccgtttcaaggggcaaaacttgaatatgaatagcggattttattcacgagcatttactctgcatttcagttatcgctttggtggatataagaaaaaggagataaaaggagtagatacatcaagatttagatactaattcaaaaatgatatgagaacattgttactaattctgagtgttttatgttttggttcatgcaaaacatcattgattacctatcaaaatggatatatatttgacaagcaaggtgaaacgattggtaattatactaacgggtatatttatagttcaaagagactacttaaaggatattattccaatgggtatatttatgatgataatcacaatattgtagggaattatgcaaatggatatgtgaaaatgaaaaacaaagatgattaataatataatttcaacactacatggaaagtgtattacaacagagatttttccgtttattatcggaatactcgcagtatgaagtttctgaattagagttaacagaagccattgaagaattggctatccatttagcagattccagtatgaacgagcaggattacaacgttttactgcgttatttttcctttggtttacaccgtcttaaatcgtaccgtgtacggtttgagcaagaaaaaaataccctatttgcatttaattgatgaagcgataggacttttgaacactgaaatacgccttattgaatggcgcatcaaatacccggaacaactacagcaacgcatcaataaacagcccctttcccctctccacctcgccgataaaacaacccttatcaatatcatggaagtggtaagcggcttattcctctccaaagacatcgtttatcagaacggtaaacctgcctatttagtggacttatccaaaggttttgaatggttgtttaacattaagataagcgactgccaccaaaaacatgaggacgtgataaaacggaagccgggtaaactcaccgaatttcttaatggactggcaaacctaatcaaaaatgaacatgataagaaaggatatagataatcagcaacttatgatttatttataggggactccattagttctcctgtaatttctttgtatccgtttttagaactttgcttcatcaatcgattgacaaacaagaatgtataatctgaaacatgaagcaattatgtatatagacaatgacgaatttggtgaatggatgcagaagttgtatgccaaactggaagaactctgcaaagatgtacgggtactacgcaatgccgacagggtactgcccgaagatgacaacctgctggataatcaggacttgtgcctgttattcaaagtgagtatcaagaccctgcaacgctaccgggctatcggtgcgctgccttacttcactatcagcggaaaagtgtattacaaggcttccgatgttcgggaattcatcaaggaaaggtttagtattaccacgctacgccagttcgaaaaagaacactgtacgaagaaaaagaaatgaatctgaaaagccggaacggtagaatgtacttcatttgttccggctttccctgcttatggcttacccagcttatcggcttctttctttagctgttcggcttgctcgttcaacagccttgcacgttccagtgcttccgcctgcttttggatacgatattcaaaattcatcactgaatcggtcagacttcggataaaaccgttatcccgttgccacttgaacttgttttccaacatatcaaaagtttccccgtctgcctgtccctgcatcagcaaatagcggtatttcatatcgttgtcctgcaactgctgcatacgttcagccaaacggatattcaagaatatggaaacggaacagataaccagcactgccgaaaaaaggaacaatcccggacgaatccaagaagcgaccttgttgtaaatccgttgatagagcggtaagggcgcagcttcctctttatccgttttgcaagagcccaaagtatcaagcattaccttgaaacaacgataggtttccaatactattttcttggtgtcctcgatatgtttctgctgaccttgcatcctgttccttatctcgtcaagctggctttggatagcctgcaaatccttttcgggaacaaccgggttactgtgcaattccgacaatgcctgttcgattgcgttcagcctttcgagagtttcctcccgactggctggcgttacctgtgcttcctgcttctctttcagttctgtgactattgagagaagcccctctaaaatcaaattttcctccatacgcttataactttagttgttttttcttttttctcttcttctttctcaaaaaggaatcatcgggcatttcatcagccggggctgacaaaccggaaaacagaccgcctaaacctgttataaaagaattatccgttttgtcgggtgctgatactgatttctgaataggtgcggtaaccgcctgcttattgcttccggctgtcgtctgccctacatccccaaaacatttatccagtttggagaaactgaaactgcggtctatctccgaacccttgaacgtgtattcgcctttggaaaaggaaacgccttgtatctcgcttgtctgccccgtatacttgaaccggatagtgatacccttttccgctaatcgctcctgtaactgctgccagtttcgggatttcccgatttcattctttacagcgtggtaaatctcgtatttcgatttgtccggttctttcaagcggtgctgctttacctgttctttcccaccagcaaaataaagcccgtgtttggctttcagcttcttgcatacctgctcgttacggtacatatcgttcctgtccgaaatggtcttgccgttgttgtctatacggttgaatacgatatgcacgtgcggatgctcccggtcttgatggcgcacgatgatatactgcgtatcggtgattttcatctcacgcatgtactcctgcgcaagctgtatcattttctcgtccgtcaatttgggcgcatccactgccgaatagcttagcgcaatatgtccgactggctttttcaagtcgggattcatcccggtctgcatacagaagctgcggattatatctccccggctttctgtcagtaccccgtccgcatggagcaaagccgcctgttccttgccaagcacatagttcacgcagcccttaaacccgcttcccttttttatttttccaatcatccgacaactggtttataatttcgacaatcctgtttttgagtttcaccagttccaccgccaccagtgcgaaacctccggcatttgcccggtgtgccaactggttgatgttgttggcttcccctgccagtttgcgaatggtgtccgcatcctgcctgttcagccggggtatgacctctgccgaaacaaccgcctgccggacatactcactgacacgcaacccggcttccccggctcgcttcctgatggcgtaatactgcaactcggtcagcttcgtgctgactacccgttgctgcttctctatccgtttctttgccggacgtccccccggcttatcctttatattcgtcataggtttttacatttaaatggtatcttaaaaattgcgaccaacgggagaaattttctttgctgtcaagcaaagcaaggtagtttcggtttaccgaaacataaccttgctctccaaatcaaaccacctgccgctggtaatcctgccggactaaatgcccctaccccttttctgtcttggggtggtaggttgtccggtttcctgctttatctcctgcgcttggctggtgctgttcttctgttcctgcttcctgccgcacaggtaatcgttcaagtccgaataccccctgtaattgtccgagaagtcacgcacacggtaggagtattccaattcgatagcccgtgtcgcttcatatcctgccttgtcattgtcaagcatacagtgaatgcgttcatacgggtacagcacatcaatagctttcggcacgttgacagtcgaattaagaataacataatcctgcctgtcaaggtcgggcatggtcggacagttcttcatccggagcgtgaggaaagaaagatagtccataaaaccctcgaataccaaacacttctctctcggctctccctgctgccatatatgggtgatgtctttcggggcgatgcagcccttaaaaaaggaattgcgaacctcgtaacctcctgccatgttcgggaaaccgatagcaaagaacggtctgccgttattggtaaagtggagttccttacattctctttttgccagttcgacattgataccccgtccctgcaagtaacggagcaatgccggatgagtaaggtcacggacttccaaatgctggaagctcggttctgtcctacgctggggaaaagaaaaactgaccgggcggacgtgcggtgtctgttccgctatccggtttaaaaggtatggcaggctgtcggagcaatagagttcctttgccagtgcgatgatgttgccgcccttgcctgcgccaaagtcataccaaaggttgcggtcagtgttcactttgaaagacggttcgtgttcctcccttaacggtgatttgtaccataagccgttgccctgctgcttgacaggagagtaacctaaactgtgcagatagtctgcgatgggtatttgtttcacatcttcgatattcataacattttcttttttggggattaaaaaatagttgaaaagtgcgccagtcctgtttagtccgttatatatatatccgtaccatactaaacctgcttgtttcgatactgggaaagagtaagtccattcctcttgtatatacacccggactaaaccaaactgacttttaataatggaaatcgggattgtagcggtagcctttgccctctttcacaatcatgcgcttgttcacaaggaatttgttcaagtccacatggatattgcgcccacgctcgtagccgatactcgcataaccctgtttcaaggtctttaggacattctcgtaaccatatatgacctgtttgccaaaaccgttttccaaagctgtcctgtgctgttgctccgtcagttctgccagtggaaagcccctgtcttggctgggctgcttgaatacataaccgtccacggcttcgggcaatgcgctgtcgttgatacggaatgcgaacgggtcaaactcccggtcacgtatgtgcatcgcctttacctcgcttatgttgccgtcctgctggcttttcgtgatttgcaggacggtttcagccttgttgttcagttccgtaccgatatgtccccttgtgttgtcatcccctttgttcaaatgcagtacggtatggatatgcaggttatatccgcttgaccagcgcatcaagaggttgattaggtcggttgattcgctggggctgttgatgtcatacatcaagtcacggattccgtcaatgatgagcaaccccacatcgggcatattttcaagcatatagccgataatttgtttccgcttgtcaggtgtctgctcccttaacacgatgaaaacaaaatcgtccctgtccttgtcggtaggcagtccggcaagccgcaaaatacgctccatgaccttatggcaatggtatttgctctgctcggtatctacatagaggattttccgcttgttcggtggcaggtatgccgaatacttcagtacctcgtcattcttcaacgctgccgcaacgatagcggaaatgttgaatgtctttttgctcttggctttacccgtggatgcgctgaaattacccagcgtgccaatggtagagccgttcacccagagtatttcgggcggcacttcgtaagtgtccgttacctttagatgaatggttttccaaaggactgcgaaatcctctttctgcatggtaacaccctgtccggcttctgtcgcttttctattttccatagccgttatttctttagaggacggttaaggatatacttctgcgcttcctgttctatctgcgcctgcgtcttgaccgggttctgacgtaaccatgcttccaactctgctttctcaaaataaagcattttgccctgcggcttgtaatggggtatcaagttacccgaagtcagcttgtacaggtaacttttagaaaggttcaaaaacttgctcgcttcatcgaagctaagcacgttctttgaaaggaacaacattttttcgagttcggaaactcttaactctaaatctctttccatattgtttaggaatttaggtgaaacaatatgaaggtgcgcaccctcgtttttttgttaacgggggcaaagttaagagcttgaaaatgaagtctaattgacctttgtttgagcgttcaatctatgctcaacctttttgcagttgtttgatgtatttgtctatgatttcatatcctttcggatagatatttttcgcttggtctgtcgcactcgacaggtcggtacgtgtaagcggttcaccttttatcttcttcaatatcagcttattgtttgctatgacagactgccattcataaacgatgtaattataacagctaagttgcatcataagataggctaacagacgggtattattaactttcaataccccattcagtttgcagttgaaaaaatcggtaagtattttggcactgacggtagtagtaaacatattcgcttcattcacacagtcggtcagaagtttgatttcattggctttcaacgtggacttgaaaggattgcttttacccacaatcttggttggattagtatctgcactttcctctttctcttttggcaaggcttgctcttggatggcaaccgcatctgtatggtaattgctttcctgttcttgcagatagcgcaaatacttggaaagcacgacaagattaacgataatggacaaatagggaagccgcccatcataacaggacggttcatgcaaatatgcgtccatatcaaaatcagagcagtggaaaccgatatacttttttctttcatcagaattcaagtcctcaaaataaccgctttcccacaaaaaatcgggaatatccatatccaatacaatgttacgcacgacacggtatttttgttggatggctacaatattttcagtcacacggaaaatttcttgtcgcaaataatcctttagctgggcttgcgtcaaatattcacgttttaaaaatagtgcatctactttagttttatagtcatgcgctatacaactatctaatatcttctgtatttctctgaaattggtttctatatgattttccataatcgtgtgcctttaaatgttcactgttacaaatataaggtaagaatctcacttttcccgaaaacatcggcaataataaggaagaaaagataaggtaatagttaagaaattataaagatacagagagcaaaattataaaagtacaccttttctttgtattcgtcattcagtacacatttagtacgccctataaaaacagaaagtcctgataatcaggtgattatcaggacttattcgtacccagacccggggtcgaaccgggatggaagtgaatccactggtgtttgagaccagcgcgtctaccgattccgccatctgggcgcatacttgatttctcaattgcggtgcaaagatacgacattattttgaatccacaatagtttggcaaaaaaaaggagaaaaaaataataaaacatatcttaaacacttctctattcagagaataaaccgtacattagcagaaactttaaaatagagtcactatcatgacaaaccaggataattattgcgtgattatgggtggcggcattggaagccgcttctggccgtttagccgcaaaacattgcccaaacaattcttagatttcttcggaacgggtcgttcacttttacagcagacttttgaccggttccaaaaggttattccaacagaaaacattttcatcgttaccaatgcaatgtatgcagacttagtgaaagaacaattgcctgaagtgagcgaaaaccaaattctgctggaacctgcaagacgaaatactgctccatgtatagcatgggcttcttaccatatccgggcactgaatccaaatgccaatatcgtagttgcaccttcagaccatttaatattaaaagaggatgaatttcttgccgctatcgaaaaaggacttgattttgtttcacgctctgaaaagctactgacattaggtattaaacccaatcgtccggaaacaggatatggatatatacaaatagatgaacccgcaggaggaaacttctacaaagtaaaaacattcactgaaaaacctgaattggaattagctaaagtattcgtagaaagcggagaattttactggaattccggcctgtttatgtggaatgtaaatacaatcatcaaagcaagtgaagacttgttgcctgaattagcttccaaactggcaccgggaaaagatatttatgccaccgataaggaaaaagcatttattgaagaaaatttccccgcatgtcctaatgtatccatcgacttcggtattatggaaaaagcggataacgtgtatgtatcgttaggagattttggctggtctgaccttggaacctggggatcactttatgacttatcggaaagagacctggaaggcaatgttaccctgaaatgccattcgcttatttataatagtaaagataatatggtagtacttccaaaaggaaaactggccgtaattgatggattggaaggatatctaatagcagaatcagacaacgttcttttaatctgccgcaaagatgaagaacatgccatccgtaaatatgtgaatgatgcccaaatgcaactgggtgacgatttcatttagcagcgtataatacttagctgctacaacaaaagccggataagacaataatataaacgatgaacggtgaactctctgcaaacaatcatgcagttcgttcaccgttcatcgtttattatatcgaaaaactttgtgtgtccttaaacaatcacaggccttagataatttctattccctgctctttacaaagctgtaatcccagatccttcaatctgaacttctgaatctttccactacctgtcatcgggaattcattcacaaagaagatatatttcggaatcttataacgggatatcttatttctacaaaaatcacgaacatcagcttcctgcattttcacaccttcctgcaagataataaatgctccgaccgcctcaccgtatttcttagaaggaatacctgccacctgaacatctttcactccatcaagtttataaagaaactcctctatttcgcgcggataaatattctcgccaccccggattatcatatctttgatacgtccggtaatccggtaatttccatcttcatccttgatacctaaatcaccggaatgcaagaaattgttttcatcaagcacttctgctgttgcttccggatttttataatatcctttcatggtgttatatccacggttgcacatctcaccttgtacgccaaccggacattcttcaccagtttccgggtcgatcacttttacttccgtaaattcaaaatcacgtcctaccgtattacaacgtacatcaaacggatcatcaatacgagaagctgtcatacccggtgcagtctctgtcagtccatacacactggtcaccttcatatacattttctcctccacttgcttcatcagttcaacaggacatagagaacctgccataatacctgtacgaagacaagacatatcaaagagatcaaacatcggatgatgcaactcggcaataaacatagtcggtacgccataaagagccgtgcaacgttctttatgaatggaagccaatacaatcagcggatcgaaacgttccaccattacttgcgtacaaccatgagtcagacagttcatggtggccaataccactccgaaacaatggaataacggaacacagcagcaaagtttatcatccgccgtgaacttcatgtgttcaccagtcagaaatccattattggcaatattataatgtgtcagcattactcccttcggaaaaccggtagttcccgatgtatattgcatatttaccacatcgtgacaatccaccttgcttttgagttcgctcaaacagtcatcttccacattatttcccaataacagaatctccgctgtattatacataccacgatgtttctcctgtcctacatacactacatttctcatgtacggaaaacgttcactcttcaaatgtccgcgttcacaggttttcaattcgggaagcattgtataggtcatctgcacaaagtcactgtccttctcgccattcacgatacaaagcgtatgcatatccgagttctggcaaagatactccaactccgattgtttatagttcgtatttacagtaacatataccgcaccgatcttcgcacaagcatacaacaatgtcaaccaatcgggaacattagccgcccagatacccacatgggtaccacgttccaccccaatggcgataagccctttcgccatatcatccacacgacggttcaactgactccaggtaaaacggagattgcggtcggaataaacgatatattccttatcgggagtctcttcagcccagtgctcgagccactgccccaaagtacgatcaaataattgcatgtaattatacttaagtcttggttcctactatttcattaaattggcgtgtaaactactgccaggatttttgcagcctgcccctcgtaagcatgtacatgatgaggaacaatggaatcataataaatgctatcaccctcttccagcaaataggtattcttgccgtagctgatttccatgataccttccataaccatgataaattcttccccttcatgagaagaaagcacgaagtcggtatcttccgttggcatcacatcgataataaacggctccatgtgacgatccgcctttgacttggacaacgagtggtattccatgtgtttgcgagaatgaatcgcgttattggagaaacttatcgcatctttggcttctttcttacgacaaaccaccggtccgacttcatcctgatcgtcaaggaaagtccccagacgtactcccaatacacgcgcaattttaattagcggtgcaagagaaggtatatcaatgttattctcaatacgttcaacctgttcgatagccaaacccgaacgttgtgccaactcttctatgcttattgatttatcttcgcggagggctttaattttttcgccaacaatcttacttgtatccattttgaaagcattttagttatcaaaggtgataaattataataatcaagctgcaaaaatagcaaaatctttagatgaacacaattataaccgaagaaaatacgactatcaggaagaaaaagaaaaaactaaaaatgaggttgtgtcaaaacgttggcacaacctcttttatattttacagttctgctatattttcttttggctatgctgctttttcctcatgcatttggcaacaagttgctatattccaattatatcgggttataaatagtcccataaacatatatttggcaactgtaatgagcccctttccttcttttatcagtttagcacacatttttttgatattaaaggctatagcaaagaaagcaaagtccattgtaaccttgtcttctcccacatgccggaatcttctgtatgccatgttgtatttcatttgtccaaacacagcctctggttctatacacctcctgcctctatgcttgataccttcttctgagagcaacctttcccgtgcctgccgtttgtattgatttaatcggtggttgacttctataatacggttcccccgagctttaaaacaactgccacgcaaagggcaaccttcgcatctttttgctttataccgggcactttcgatgatgtatccgctcgctgtcttgtcacgtttggttcctatacggttcatgtgctgtcccataggacaaacgtaataatcctcttgggcattgtaatggagactttcggcatggaatgggttgggagtataacgaggacgctgttctttatggaagtaattgtacttgatgaaggcttctatcccattctcctgcatgaaccggtaattttcttccgaaccgtaaccggagtctgccacacagatattcggtaaacggttatagcggtactggaaagagtggaaaaaaggtatgagggtcagtgtatcggtagggttgggaaacagacggaagtctgtgatgaattggttttcagtacctatttgcagattatatccgggtttggtctgcccgttcttcatggcatcttctttcatgcgcatgaatgtggcaccaggatcggtcttggaataggagttacgttctccaagggtatcaaggtgattgtcgtattctatcagcttgtcacgatacccttcaagttccatgacctgcttcttctttttgcgcagggctttcttttcttccttatcctttgttgcaggctggcgttccagggcttctttaagttcatccactatgtcagagagcctgcagggagtaaactccacggatgtgtcttttatagagttctcctgtgcaatggcttcatccacctgttccaagagaatacggattttatccattagtctcgtacggttccgttcgactgtcttgcgccagacaaaagtatatttgttggctttggattcaatcttggtgccgtcgatatactccacatcaaggctgatgaaacctttatcggcaaggacaagaaccaactgggtaaatacattatttatttcctcctttacacggttacgaaaacggttgatcgtgataaaatccggatgctcattaccggcaagccaaatataatgaatgtcacgaaggaggtgcttctctattttacggcaagaatagatattattcatgtaggcgtagattatcaccttaagcatcattttaggatgataaggacaacggcccgtttccttataaagcttcttgaaactctcaagattgagattgtcaataacagcattcacgatgcggaccgggtcggtcgcagctatgttttcatcaattctttgtggaaaaagaacggtttggttgggaatgtaaggacgaaaatgtaactttgccataacgaaaaactttatacctaaagatacgaaaactttgggtaataacaaagcccgggcttgagaaagtctgggctttgcgcataaaaaaaggctgtgtcagcgttttgacacaacctctgaaatcttttcgcgacaagtagattacttacgcaaaccgagctctttaacaatagcacgatatctttcgatatctcttgctttcaggtaatcaagtaagcgacgacgcttacctaccaacattgttaacgctctttcagtactataatcttttctgttgagcttcatgtgctcagtcaggtgagaaatacggtaggaaaacaatgccacttgggcctcagctgagccggtgtcagtgttagactttccgtactttccgaagatttcttgctttttagcagcgtctaaatacataattcttagaattttaattgataaattattcttttgagcgtgcaaagataggcattatctttatatcacacaacgatttacaagaaaaaattgctatcattgcgcatatttctaatcctattttcgtacctttgcagccaaataataggtattatatgcaaaatattcgaaacattgcaatcattgcccatgttgaccatgggaaaacaacgctggttgacaagatgctattggccggaaatttattccgcagcaaccaaaatagtggtgaacttatcctggataacaacgatttggaacgcgaacgtggtataacgattctttccaaaaacgtatccatcaattacaacggtacaaaaattaatattattgatactccgggacacagcgacttcggtggtgaggtagaacgtgtattgaatatggccgacggctgtattctgttggtagacgcctttgaaggtccgatgccccagactcgtttcgtactgcaaaaggcactggaaatcggtttgaaacctatcgtggtagttaataaggtagataaacctaactgccgtccggaagaagtttacgaaatggttttcgatttgatgttcagcctgaatgcaacggaggaccaactggacttccccgtaatctacggttccgccaagaacaactggatgagcaccgactggaagcaacagactgacagtattactccgctactggattgtatcatcgaaaatattccggcacccaaacaattggaaggtactccccagatgttgattacttctctggattattcttcttataccggtcgtatcgctgtaggccgcgtacatcgcggtacattaaaagaaggtatgaatataacgcttgcgaaacgtaacggtgatatgctcaagagcaaaatcaaagagctccatgttttcgaaggtttaggccgcgtgaaaacaaacgaagtttcttccggtgacatctgcgcactggtaggtatcgacggtttcgaaattggagatactgtttgtgatttcgagaatccggaagcattgccgccaatcgcaatcgacgaaccgaccatgagtatgctgtttgctatcaacgattctcctttcttcggtaaagatggcaagtttgtgacttcacgtcatatccacgaccgtctgatgaaggagctcgacaagaatctggctctccgcgtaagaaaaagtgaagaagacggtaaatggattgtttccggccgtggcgtactccacctttctgtattaattgaaacaatgcgccgagagggatatgaattgcaggtaggtcagccgcaggttatcttcagagaaatcgacggtgtgaaatgcgagccgattgaagaactgaccatcaacgtactggaagaatattccagcaaaattatagatatggttactcgccgtaaaggtgaaatggtcaagatggaaaatacaggtgaacgtatcaatcttgagttcaatatgccttcacgcggtatcatcggtttgcgtaccaatgtactgactgcctctgccggcgaagccatcatggcacaccgcttcaaagaatatcaaccgcacaaaggagaaatcgaacgtcgtacgaacggttctatgattgctatggaaagcggaacagcttttgcttatgccatcgacaaattgcaggatcgcggtaaattctttatcttcccgcaggacgaagtttatgcaggacaagtagtaggcgaacactctcatgacaacgacctggttatcaacgtaaccaaatcgaagaagttgacgaatatgcgtgcttccggttcggatgataaagtacgcctgattccacctatccagttctcacttgaagaagcactggaatatattaaggaagatgaatatgtagaagttactcctaaagcaatgcgtatgcgtaaagtgattttggacgaaatcgaacgtaaacgtgcaaacaagaactaaccattctttcataatattataaaaggaggttgtgtcaaaacgctgacacagcctttttttatgcgcaaagcccagactttctcaagcccgggctttgttattacccaaagttttcgtatctttaggtataaagtttttcgttatggcaaagttacattttcgtccttacattcccaaccaaaccgttctttttccacaaagaattgatgaaaacatagctgcgaccgacccggtccgcatcgtgaatgctgttattgacaatctcaatcttgagagtttcaagaagctttataaggaaacgggccgttgtccttatcatcctaaaatgatgcttaaggtgataatctacgcctacatgaataatatctattcttgccgtaaaatagagaagcacctccttcgtgacattcattatatttggcttgccggtaatgagcatccggattttatcacgatcaaccgttttcgtaaccgtgtaaaggaggaaataaataatgtatttacccagttggttcttgtccttgccgataaaggtttcatcagccttgatgtggagtatatcgacggcaccaagattgaatccaaagccaacaaatatacttttgtctggcgcaagacagtcgaacggaaccgtacgagactaatggataaaatccgtattctcttggaacaggtggatgaagccattgcacaggagaactctataaaagacacatccgtggagtttactccctgcaggctctctgacatagtggatgaacttaaagaagccctggaacgccagcctgcaacaaaggataaggaagaaaagaaagccctgcgcaaaaagaagaagcaggtcatggaacttgaagggtatcgtgacaagctgatagaatacgacaatcaccttgatacccttggagaacgtaactcctattccaagaccgatcctggtgccacattcatgcgcatgaaagaagatgccatgaagaacgggcagaccaaacccggatataatctgcaaataggtactgaaaaccaattcatcacagacttccgtctgtttcccaaccctaccgatacactgaccctcataccttttttccactctttccagtaccgctataaccgtttaccgaatatctgtgtggcagactccggttacggttcggaagaaaattaccggttcatgcaggagaatgggatagaagccttcatcaagtacaattacttccataaagaacagcgtcctcgttatactcccaacccattccatgccgaaagtctccattacaatgcccaagaggattattacgtttgtcctatgggacagcacatgaaccgtataggaaccaaacgtgacaagacagcgagcggatacatcatcgaaagtgcccggtataaagcaaaaagatgcgaaggttgccctttgcgtggcagttgttttaaagctcgggggaaccgtattatagaagtcaaccaccgattaaatcaatacaaacggcaggcacgggaaaggttgctctcagaagaaggtatcaagcatagaggcaggaggtgtatagaaccagaggctgtgtttggacaaatgaaatacaacatggcatacagaagattccggcatgtgggagaagacaaggttacaatggactttgctttctttgctatagcctttaatatcaaaaaaatgtgtgctaaactgataaaagaaggaaaggggctcattacagttgccaaatatatgtttatgggactatttataacccgatataattggaatatagcaacttgttgccaaatgcatgaggaaaaagcagcatagccaaaagaaaatatagcagaactgtaaaatataaaagaggttgtgccaacgttttgacacaacctcatttttcccataagtattactaatacaacagtaatcctaccacacccgccagacaaatcaacagaataggatgaagattccatttccatgtaaccaaaaaggcggctgcgaaaataccgatacttttatagtctataaaattctctctattcatcataagtaatgcagccgaagcaatcagcgcgaccgacataggaagcagtccagacatagccgctttaatatacttattatccttacacttcgcaaagaaataagaaatgagcaacaccaaaataaaagaaggcaagcaaacggctacagtggccaacacagctccccaaacactttgtgttaccgcataacctacgtaagtagcactatttatgccaatcggtcccggagtcatctgcgaaattgcgaccacatccgtaaactgttgaggagtcagccaatgatgaagatccactatttcatgttgaatcagggaaagcatcgcatatccacccccaaaaccgaacatacctattttaagatacacccaaagtaattgccaatatatcatacctgtttattcgctattttttctttcaaccataatgtatataccaatccccctataattccggccaccacaatataaataggtgataagccgaactgccagatcaacacggtagctatggcaggagcaaccaactgaaaatacttcagtttcaaagctctaacagcagaaatgcaaggaaacagaatcaatgctaccacggcaggacgtattccattaaagatacgaatcatcacttcattatcctgaaactgtgcaaaaaacatggctatcagcatcatgataacgaaagagggaagaatcgtagccaatgcacacaccaggctaccacccaccttatacaacctatatcctacaaaaatagaaatattcactgcaaacacacccggaagcgactgcgtcaaagcaaacatctccataaattcttctttattcatccattgcttgttaacaatctcccgttcaatcaacggaatcatggcataaccgccaccaatagtaaacattccaatcttcgcaaatgtcacgaataattttaaatactccagtaccatcctttctttctaattttccgacattttgtgtttattttttaatgagccctttggctgcatcatatccaatctgataactgcgtcctttcacagttttaaaggagatagtctgatccgcatactttagacgcagtcgcctcctgcattagagcgtacaacagcttctttcaattgatgattctcccagatcacatccacctcaaaatttccttttgcacagataccactgatagaaccgtctttccatgcatccggcaaagccggtaataattgaataaagcccatgtgactttggagcagcatttcggtgattcccgctgtcccaccaaagttcccatcaatttggaaaggcggatgcgtatcccacaaattatccatggttccgttcttcaataaattgccgaataaagtataagcatgattaccatcctgcaaacgcgcccactgattcaacttccaacccatactccaaccggtagcaccatcaccacgatgcaccaataccactttagcagctttcgccagttcgggagtagtgaccggagaaacagtatgtcccggatgcaggccgaacagatgattcacatgacgatgttcatctttcggatcatcaatatccaccgaccattccatcaactgaccataacgacctatttgatagggaacgagattggcaagcacatgctcccattgcttacgttctttcttatctacacccaacactttgcttgcttcaatcgcatccatcagaatttcacgcactacggcatgcacaaaagtagctccctgatcgataggaccatgctcgggcgaagtggacggagcagccgtataggttccatccggcttatgccacaggtaatcgactgcaaaatccgcactactcttaattagttcatagccggtttctttcagaaatttcaagtctcttgtatagtcgtaatactcccatatatgagtagccagccagggacctgccatcggattgaagttccacgacatatcctgactttccaacggagtggtaaagccgaaaatattgccggagatagatgccgtccatcctcttgctccgaaataagcttgtgcagtcttctcccccggtttcaccagtgtacggataaagtcaatcaacggaagcacgcactcattcaagttggtagaacaagcaggccaataattcatctggatattgatgttattatgataatccacacgccacggtccatcgacattattgtgccaaatcccctgtagattagcaggcatattgcccggacgggaactggcaatcagaagataacgtccaaattgataatacaactcttccagataataatccggctgtcctttccgataatttttcagacgttgggaagtaggcagattcactcctttcaccgctgggttcagattcagccgaacccggttgaacagagtagcataatcattataatgttgattgaataaagctgtatatccctgcgccactgcattattcatccactgctttgtcgtttcttcgggattaacgcctatatatgttttcggatctttgaaatccggatcaaagttaatcttatagtcagtgtccgctgtgatataaaatacaacttcgtctgcatccttcaccgtcaactttccatctgcattagacagtgttcctccttttgtttctgcctggatgcgcacaacatacttcattccattattatccaaagaagctgtgtaaaccagtcctttatttccatcagaaaccatgctgccggtagacaggggattgggcgcataactgaaaaccagattttgtttccccgattgatccgcgctgaaacgtaccaccattacattggcggggtaagagataaaaaaattgcgttgataagccacacgatcctttttgaattgtacgactgccatagccgaatccaaagaaagaatgcgcttataatcgctcattcctatcatattcagtccggtttctacataaaactctcccattgtagtaaagctaccgaaacggaaaggattttctccgtcagcttcatacgacacttcactattgaagttctgtcgcgttagcatttcagcctttttctgatctccctctgtaaatgctttgcgtatttcatctaaaagatgggccgattgtttattgacattccaataatagtccgcacctttcgctgtgttcggaccaccgcgccaaagcgttttttcattgaaagtgatacgttcggcttccaccgatcccataatatttgcgccgaggctaccgttaccaataggcaatgactgtgactcccaactggcatccagattatgtccgcttcctgctgttaccggtttattttcatctttccacaaatccggtcttccgccataccaggcagcatatccctgcaaagtattcggagtatcaaaccagatggaaagtccttgagtataatctgtttctcccgcataaagcccggaggtaaggaatagggaactaataagaaggaaataaaaattcttcatggtcgtcgcgtcgttatttaagattaataacctatttatagtctgtacaaaagtagtcaaaatatatatctaataaaaataaaacagaatctcaacaacctctataatgaggtaaaattacatcaaaccatccgacagtatttttttcacgacccaatacccgactctggcctctgaaatccctgacaacaaccgatgaggacagacaaacgcatcatcaataatttctgcttccatataataaaagcaacaggaagaatccttttcaaaggctttcgcatattccaaaatatgtgtcgatatcaagaaatgacaatgagagaagcttttcagtaattcattgacggcaacggaggcttcaaacgcatctttagcattcgtcccgcgaaacatctcatctaataccaccaaacagcgttttccggtcacagctttttgcatcacttctttaatacggagtacttccgccataaaatgacttcgtccgtcccgcaaagaatccggcagattaatagaggtataaatcccctcgtaaagaggacaaatcattgatttcacaggaacaggcaaaccgcaatgtgccaaccagacagccaaggtcaatgcctttaaagttgttgactttcccgccatattagagcctgtaaaaatgcatatatttccccgggacatctgccaactgtttggctgcgcatctttcacaaaaggatgaacgactccctccaccgagaagtccattgtcggtaccattatcggcatacaacagaagttcttctcttttgccacccggtgagctgtacggcagacatcaagtagatatataacagacagaagttccttcaaagataacaaccgagtacaccggaacagataatcgaatttgtctatgacaaagttagatagtcgtttttcctcatcagaggtctgctccaatacttcctccaattcacttccatggagaatattatcaatcatagcagcagattctttcatgagttgcggggcgccctgtggtagttctgtcgcccattccttcagacaatgcaagagatgaaccactaatttcacccctctgcagatcacataacgggtcgaatcatatcgcaccagacggtcgataacagtagcacatgaaagtaaaatatgagcttcccgtatctggtcacgataagccaggtaatactcaataaaatccagctcttcttcattcaaaagaagttcgggcaaagcatcccagacaatagcctcctgtcttttacggatttcccccaaatcacttagcggatacataatccagttcaacatcagcgcttttccttcttttgtctctgttttggaaaacaaagagaaaagaaattgctcattattagcagtctctgtaatgcttagatccgcataggtctgtttgtcagtagctagatataccataaccgcctttaaaggttagtactcctgttttggcaaatatagggaaaagttttaaacaaacagcatttattctcatagaaaggcacaggcataaacaaaaaaggcggttcgaaatcgaaccgccttccatattatatctgattctccaattagagtttcggaccagcagcaaccaaagccttaccagcttcgttaccagtaaatttagcgaagttcttgatgaaacgtccagccaaatctttagctttttcttcccattggcaagcacattcgtaagtgtcgcgtgggtcaaggatcttcggatcaacacccggaagttctgtaggaacaacaaagtcgaagaaaggaataaccttagtaggagctttgtcaatagaaccatcaaggatagcatcgatgataccacgagtatctttgatagagatacgtttgccggaaccattccatccagtgttaaccaagtatgctttagcaccagtcatctccatcttcttaaccagttcttctgcatatttagtcggatgcaatgacaagaaagcagcaccgaagcaagcagagaatgtcggagtcggttcagtgataccacgttctgtaccagccaatttagctgtaaatccggacaagaagtagtattgagcctgttccgggttcaggatagatactggaggcaatacaccgaatgcatcagcagacaagaagataacttgttttgcgtgaggacctttagaaaccggtttaacgatgttttcgatgtgatagataggataagaaacacgagtgttttcagtcacgctcttgtcagtgaaatcaatcttaccgttagcgtcaacagttacgttttcaagtaaagcgtcacgtttgatagcattgtagatatccggttcactttctttatccaggttgataaccttagcgtagcaaccaccttcgtagttgaatacaccttcgttatcccatccgtgttcgtcgtcaccgatcaatttacgtttcgggtcagtagacaaagtagtcttacctgtaccagacaatccgaagaagatagcagagctagttccttccatatcagtgttagcagaacagtgcatagaagcgataccacgaagcgggttcatgtagttcatgatagagaacatacctttcttcatttcaccaccgtaccaagtattcagaattacttgttctttagtcttcaggttgaatactgtagcagtttcagagttcaagcccagttctttgtagttgtcaacttttgctttagaagcgttgaaacatacgaaatcaggttctccgtagttagcaagttcttcagcagtcgggcggatgaacatgttagttacgaagtgagcctgccaagctacttccatgatgaaacgtactttcatacgagtagcttcgttagcaccacagaaagtatcaacaacgaacaaacgtttgccggaaagttgttttacagctttagctttcaagtcagcccaagcttcttcagtacatggtttgttgtcgtttttgtaatcttcagaagtccaccatacagaatcagcagaagcttcattcttaacgaagaatttatctttaggagaacgaccggtatagatacctgtcatcacgttcacagcgcctaattcagttacttgacctttttcaaagccttccagactcggttttgtttcttcagcgaacaaaacatcataagacggattgtgcaaaatctcggtcacacctgtgatgccgtacttgcttaaatctaaatttgccattttctttgaattaattaaaattggtattttgttttctatctcttttcaccttaacatggggagctttggatagccccttgtaaatccggctacaaaagtaatactttctttggaaaggaagaaggtattagagaaatttttccctaattgaaactcttttataaattcctaacaatatctgcaaactgaatattgcaatttgaaagattatcgtttactttgcaagtcagtatgctagcaatgctgtgaaaatgagattaaaatctgattaaaatataatatgaaagtaattgattttggccaaactaattcgattctaaaccagtacatatccgaaattagaaatgtagaagttcagaatgaccgcctgcgtttccgccgtaacatagaacggatcggagaaatcatggcttatgaaatgagtaaagagtttaaatactcggtaaagaacatccagacaccactgggaatcgctccggtcagtacgccggacaacaatttagtaatcagtacgatcctgcgtgctggtctgcctttccatcaaggtttccttagttattttgacggagcggaaaatgcgtttgtttccgcttaccgcaaatataaagatacgctaaaattcgatatacacatagaatatatcgcttctccccgcattgatgacaaaacgctgattatcaccgaccctatgttagcaacaggaggcagtatggaactaagttaccaggcaatgttgacgaaaggtcatcccgctgaaattcacgttgcttccattattgccagccaaaaggccattgaccatataaagaatgtatttcctgaagacaagacaaccatttggtgcgctgccattgatccggaaatcaatgaacattcttatattgttccgggattgggtgacgcaggcgaccttgcctatggtgaaaaagaataaacgcttaaagattcttccgatattgctgcggtgaaaccccaacctgtttcttaaagaacgtaccgaaataagaggcattggggaagccgaaggcatttgaaatctcctgaatatccttctgcgtatttttaagtaacgaaatactcttacgaatgatcgctttgaatacaagttcctgcacggtatatccgcaaatactcttagaaacggcagaaagatatttaggagacaaacacaatttatccgcataaaactcaacgccgcgttcctgcatataatatttttcgatcaactggatcaaatgaataaagacttcgtttttgcgtcctcccacttcccgcccgtcattaacgagtttgcggttataaatggaacaaatcctgtacgtcaatgcaagtagaagtaatttctgctcataaagtttaaatgaattctcctccgactgcaacacattgtccaataaagacatatactttactatttcttcttcctcaccagtagaccagacacaagaaggttcttcgggagtaaggcgggaatacatatacatggaaacaaccagattccccataatatcccggataggttctatctgatagatcaaaatctgcacctccatgtcttccgattcttgcaaaacctgaaactcgccatcttcgggaataaacaaactttcgcccgcttcagcgaaatgctttttctgattaagcgaaaactggaaattaccctggcggcaaataaccagccccagtcctttcatttggaaaggtttcttcagtgagggtggaaaatttacaaatatcccttcggagctacatatatttttcccacttaacaaatcgcgatcaaactgcaataaacgatcttgtccgctatccatcatactaatatattaacagatcattatcaaaaacgacgctaagttagcaattttcgtttaggataaggaacaacgagcacaaatatcatacaaattaacccaccataaattgtccatcccgccatctctttgagtgcagagagcgtggcctgcacctgaatacgccctttggtagatatagcagccatgttacgggcttccgtctcactctttccctgatatttcataccttgtaccgtaccaaggaaggaagtggaagcatccggattaagcaggtccacattttgcgcataacgggttatatagtgttgttggcgctcctgcaaaacatttgtataaattgctccgccaatactcggtcccacaaccatacgcacagtaagcataatacagatccaggtggaaagatatttaaaaggcatacgttgattggcataagcagccgtcagcgcatacagaatcatcatgcctgtggcacggatgataactgcatatttcagacgctcgtaaactcctgctgtctgtacctcgaaatacatgaaaacagctgataaagacaggaagaagaatcccatcgcaaacagatacttaaaatgtaaccctttacctcccaacaccatagcaatcacggcgccaatagcataacctaccatacaccaattacctaatgaagcattttgcagattatcgagatgcatccccactcctgcaaacacattgacaaacatagcactggagtttatcaccatcaataataagtaaagtaatgctcccatacgtatagtacgcagtttgaacgcatccagcaaaacataaggcgaccggcgcgttacgtccatatatagaaaaattcccgcaaaaagaatacttacagctgtcgcccaacggatagattcgtcatcataccagtcgagcacttttccataaaccagcacatacgtgagacaagtcagcgagatgcaaaatgcagtgacattgccgaacttacggaaattaataggaaaccttccgggaaacttataattcggcatggtaataaacaagagcaaaatagagatcaggagaatccccatcataaagtaatacacatatttccactcatattcaaaggacagccaagccgtcaatgctgtgcccgactgtcccagaatcataaaaaacagataaacagccggctgactcacacatctttcaatgtccaatttattccaaccggcagtatctttcggctccaaccccggagtaatattgcgggtagcttccattccacccgcataccaaatgagtgtgaacagattgaccatcatcagtaccatacgcaagaaacccgtcagaagactacaaagcgccaacagaaaaacgctgtctgtctttgcacagatataactgaatatatacatgaacgcaaacccgacaatacacatcatcttctcccgccgcacacacaccaactgatataggaaaggagcaaaggctgccataccaatagaagtaacaaagttggcaaactggatatgctcggatataatgccaagcccgctcatcatttcggtgctattcaccgaataaaccccgcctaccgtaagaatcggcagaaagaaaaataacagaatgataatacccaacggtttgggcatccagctatagaaaggataatttttgggataagagggcattaatttttaatttatgaattatgatttatgaattataggtacacggtggttagagtttggctttcactactaccatcatgcctgctgctaatcgttcgttgtcttctttcgataaatcggtgaagtcgatgcgtacggggatgcgctgttggatcttcacaaagttgcctgcggagttatcggtcggcactaatgaatatttggaaccggtagctcctgatatagaggtgactttgcctttaaactctttatcgctaatggcatctactgtgacaaatacttcctgtccgatatgcaggttctcgatttgtgtctccttataattggcaacgatccatttctgggtatcaggaagaatataggtgatggtctgccctgccgaaataaactgtccttcctctaatgagcgacggccgagttttccgtcacaaggagctattacaaccgtataggaaagattcaaccgggccatttcgagcgcagctgttgctctttgaatagccgcttcggtattcatgcgacggtaggacacttcatctacaccggaaagagctgcttttttctgccttttcgtagcttccagcttcttacgcgtagcttcataatcagtgacaatctgttcaagttggataggagtagccgcatttcgtttcacgaggttctcatatcgtttccggtctttttccagtttcgccaaccgtacttcaatctcggcaatagacgcatcgtaaacagatgctgttgtctgcgtggtattgagtgtagcattgatgacggtcgcaccggcttgcgcatctttcaaggcagcttcagcctccattacgcgaattttatattcacgatcatccagtaccagcaaagtatctcctttatgtacctcctgatgttctgtaaagtagattttgtcaatgtaacctgaagcacgtagattgataggagacacatattgttctatttgtgcatcgttactagtctccgtctggctataattcaaaaaaaggcagatcacttcaatcactccccaaacaataatagccactccgaaaaggctgatagcaatctgccagcgacgaagtttcttcattttttttgctttctcctgatgagtagcggaaggaaggttattttccattgtttccatatttatgattgttatttgcgtattatttgactaatgattctatttgtccggttagtttaagcaacatcaggttagtcacccgatagttataatgtgcgctgatatagttgttttgagcttcgctcatctgcatttcatcttgcagcacttccgtcatagaagcaatgccttcccggtaacggtcggaagtgactgcgtacacatcttcggcaagcaagtaattatccttctgtttcttaaagttacgctgattgttcatcaggtcgttcacagcattcagatattgagtttgcagattcttccgggcatcttcccatgccagccttttgttctctatatcgatcatcgccttctttattttataggttttatccagtccgtcgaaaatcggaatacgcaaggttagccccactccataggaacgaaaccattgattggacggaccggagtggaaccaatgataacctttatccgtatatgcagcatatcgccagctacctgtcagactaagagaagggatatatccattagtaatgatcttcttttgccgttccgccagttgcacttgcgattgtgagagttgaagttcatagatattttccgacaagccggtcagggctaccgtagtaatgctatcggtatttaccggtatcagcgcgatttccttttcagccggataatccataatgtatttcagcatattcaattgctgtttcatcattgcttgtgcattgtcatattgcaccttcagattttccaaattgatattgactcttttcagatcgacttccatagacattccgttatcgaagaaagcctgtgtaatatctctcaattcttccagacgggtgatatttgcttttatcagcatgatttgttcggccgtgacctgtccgagataatacatcttactgatttgaagaataacatcttccctggcttttccataagacagacgactgatttcttccatcactttagctatggacatagaagtataaagagtctgattgaaaagcggcatctgcatttccagtcctgcattagcagaatgttgcagcgtctgcgttatattataaggaacaccgtaagatgatccgtctgtgacggacaccggaggatcaaaattgttactataaccggctatcgcatttatttgcggcaacagcttcgaacggttttcagatacgccatacttacttctttgtatttctttacgttttccttctagcgacaagttattgtcaataccaatgcggaggcaatcctctaatgtcagaatctctacctcctgtgtttttccgtttaacacgaacaagaaaaaaaaggaaaaaatgaatagtagtcttttcataatatatgctctattattggctacaaatttagcagcttatagcataatgagactatccacaaactatttgtttatattcatattttcctttttcaatgggtaaatgaatggacagtcactctcatagataaaaacaagaatcctctttcaacctatcacctatattatcaaaccctttattcatcgtattttcagaatggtaataggttactgttgtagtttcaaggcggggaaccttcctccaccccaaagcataatagcataaacccatcggacgaagaaaagtcaggcatttgatagacaaatctccacccttagtcgattttatttttatctgctccagtatctacttagctttgagatattaaaacaaataaaagcagtaagagaaatgagaaaaaacatgaaattgataggattggcagtcagcttaacatgctgtgcaggttttatagatgcacaagaagccaatgagccgcaagaaaggcagcaacaagaaaagcatcttccacgcgaagttctgaatccagagaaggtagcaacccagatgacagagcaaatgaataagttgctccaactgacagataaacaatataagaaaatatataagctgaacctgaaagagcaaaaagcatttttcaaggctatgcaaaattcggatgactatcgcccaccaatgggagaaggtcccggtatgcggggaggacgtccgccaatgggtggaggacaaccgccaatgatgggagaagatggtttcccgggcagaatgggaggtggtccgatgatgagcagagataccaattctgccgactcacaaaagaaagccgcagaaaccaaagaaaagaaaataaaaaagattctgacaaaagaacagtatgagaaatggcaggccgaacaaaattccgcacgtaaaaaagcttctcaaagaaaaatgcacaaagataatcatcctgacaagggtccggactttgaacaaaaaaatctctaaaacatcacacttaatatgtttctatgaacagcgtttgtttttcataattttttagtgaatgtaaagtagaggttgtgtcaaaacgctgacacagcctttttttatgcgcaaagcccagactttctcaagcccgggctttgttattacccaaagttttcgtatctttaggtataaagtttttcgttatggcaaagttacattttcgtccttacattcccaaccaaaccgttctttttccacaaagaattgatgaaaacatagttgcgaccgacccggtccgcatcgtgaatgctgttattgacaatctcaatcttgagagtttcaagaagctttataaggaaacgggccgttgtccttatcatcctaaaatgatgcttaaggtgataatctacgcctacatgaataatatctattcttgccgtaaaatagagaagcacctccttcgtgacattcattatatttggcttgccggtaatgagcatccggattttatcacgatcaaccgttttcgtaaccgtgtaaaggaggaaataaataatgtatttacccagttggttcttgtccttgccgataaaggtttcatcagccttgatgtggagtatatcgacggcaccaagattgaatccaaagccaacaaatatacttttgtctggcgcaagacagtcgaacggaaccgtacgagactaatggataaaatccgtattctcttggaacaggtggatgaagccattgcacaggagaactctataaaagacacatccgtggagtttactccctgcaggctctctgacatagtggatgaacttaaagaagccctggaacgccagcctgcaacaaaggataaggaagaaaagaaagccctgcgcaaaaagaagaagcaggtcatggaacttgaagggtatcgtgacaagctgatagaatacgacaatcaccttgatacccttggagaacgtaactcctattccaagaccgatcctggtgccacattcatgcgcatgaaagaagatgccatgaagaacgggcagaccaaacccggatataatctgcaaataggtactgaaaaccaattcatcacagacttccgtctgtttcccaaccctaccgatacactgaccctcataccttttttccactctttccagtaccgctataaccgtttaccgaatatctgtgtggcagactccggttacggttcggaagaaaattaccggttcatgcaggagaatgggatagaagccttcatcaagtacaattacttccataaagaacagcgtcctcgttatactcccaacccgttccatgccgaaagtctccattacaatgcccaagaggattattacgtttgtcctatgggacagcacatgaaccgtataggaaccaaacgtgacaagacagcgagcggatacatcatcgaaagtgcccggtataaagcaaaaagatgcgaaggttgccctttgcgtggcagttgttttaaagctcgggggaaccgtattatagaagtcaaccaccgattaaatcaatacaaacggcaggcacgggaaaggttgctctcagaagaaggtatcaagcatagaggcaggaggtgtatagaaccagaggctgtgtttggacaaatgaaatacaacatggcatacagaagattccggcatgtgggagaagacaaggttacaatggactttgctttctttgctatagcctttaatatcaaaaaaatgtgtgctaaactgacaaaagaaggaaaggggctcattacagttgccaaatatatgtttatgggactatttataacccgatataattggaatatagcaacttgttgccaaatgcatgaggaaaaagcagcatagccaaaagaaaatatagcagaactgtaaaatataaaagaggttgtgccaacgttttgacacaacctcccttatttaataaccttatgatacacaacaggtttacgtactatttcatttcgcttaggacttcttcgctatcttgctccgctgcgtccacgcaagaagcataactccgattaacaataaagccaatgctgcataagcaatactttccgtgacgtgtatgctttgcggatcaaaccacatctcgatggtatgttcccctgccggcatatttatcgcacgcaagatatagtctgcacgggcaatatccaccggctggccatcgatagtcacctgccatcccggataatatatttcagagaaaacaacaactccgtctttaggagtggaggccttataaaccaaacgatttggctcgtaactggttaactggatggtagatagtgaatctttatatccttctgccacacctttcagctgttctttaaacttcacatccactacggctgtttccgttggaagaatatcgttcaaagcatctatttcttcatttgcattatttacatactgcaccttatctacgaaccatgcattaccgtatgcataaggattcatgacaggaacagcctgcccttgctctccggcagggaaaatgaagtatttggtattcagcatattcagtacacggaatttagaagcatccacactgtccatttgtccaccggcagtagccacagcctgataagtttctttcatttcgggcacgatgtgatggtctatcatttcctgatagcggcgaagtttcgctgcatgatagccaccgacactcttatgccaatatgctgtattgttttcattaaatgtattaccggggaaaccgatgaagttcagtacacgataattcggagtcgtatcctgaagaataatctcatccgcctgtgttttcacgaatgcttctgaccgcttcgacttcggcacgaactgttcgtcattcaaatagcgtttattgacactccacatatctatcagacacaaaagtgcaatacccgccagtgtgaaagaggctttcaacttccgcagttgatacaagaataagaacaggcaaccgatcactataataaagaagctgcgccatgcatccgaagcaataatggcttcgcgcatttcagtcagattggccacaaacggagccaaatgttcggcaggaagtgcttgtttcaaagcagtcatctcctgtgtcgttataaagctggagaagaaagtgcccggggcgacagctaaaatgagtgccacaccggcagttagtaccaacgcagcaatcactcctctgcagttcttttcctgtttcagcatatccggtttactcaaaatctctttcaaggcaaaaatcgccaacaaaggtattgtaaattcagctattaccagaatagaagatacagcgcggaacttattatacatcgggacataatcgataaagaagtccgtcagccccatgaaattctttccccatgaaagcagaatcgagaagatagtagctcccagcagcgcccatttaagaggacctttcactataaagcaccccaatacaaagaggaacatcacaaatgcccccacatataccggaccggctgtccacggctgctcaccgaaatattgaggtaactgtgaataaataccgttatacattggattggcctttgccatagcagcttcgctctgtgacatcgtagatcctgatcctcccccctttacattcggaaccagcaacgtcaacgtttcaccgataccataactccagttggttatataatcacgatccaatccgctactagtctgactggcagcagctccctcctgcttcaattcgctcttgccgcgcatcgtctccttactatattcatacgtatgatacagattggaaatattgatgcagactcctaccacggcagccagtgctaaaaccccgctagccttgaagaaatgaggcaattctttctttttgtaagcatcttcaaagtaagctcctacaaaaaacagaatcacaaacatgaaataatagctcatctgaatgtgattcgactgaatctgaagggcgatgaacagggccgtaacgattccgcccaacaggtatttcttccggtaagccagaacgacacctgcaatcgtaggtggtatataagccaatgtcacaaacttccaaatatgccctgccggtatcagaatgaagaaataggaagagaatgcccatatcactccgcctaatcctgccagccaggccgatattccaaacgcccgcaagaggatatagaatcccagcatcatgataaaagtcagcactacataatccgggagaaagaggcgataaaccttctccacccctttcagggacgttgtcgagtcgtaactcggagacatctgataagtaggcatacctccaaaaatcgagtttgtccagcgcgtacgttctccggtacgctcgagatactctttcgattcttgtcctgcaccgactccggcagccgtgtcatgctgaaacaagatacgaccttcgatatcagccggaaaaaaataggcgaaagaaagaatgataaaagccagaatggctattaagtcaggaagaaactttttcatttacgatgacacgatttactatttacgattgaagtttgaatataaaaataaatacgaccggacaatctaacatttacaattgataacagtggaatatcgatctcccttatttatcaatcgtaaatggtaaatcgtctaatcgtaaatcaaattagtatctataatgatctgctttataaggtccgtccaccgatacaccaatataagcggcctgttcgggagtcagcttagtcagtttcacaccgatcttttcaagatgcaggcgagccacttcctcgtccagatgcttcggcaagcgatatacattgatatcatatttcttgttgaacagttctatctgcgccaatgtctgattggtaaatgaattactcatcacgaatgacgggtgtcctgttgcacatcccagatttaccagacgaccgtcggccaacaagataatgctatgtccatccgggaaataataacggtctacttgtggtttgatgttcacacatttgatgcccggataatgtttcaaagcatctacctgaatttcattatcgaaatggccgatgttgcaaacgatagcctggtctttcattttctccatgtggtcgatacggataatatcgatattacctgtcgtagtcacaaagatgttaccttccagacaagcctcttccatcgtcactacttcgaaaccttccattgcagcctgcagtgcacagatcgggtctacctccgtcacgagcacccgcgctccataagaacgcatggagtgagaacagcctttacccacatcaccataaccgcataccactactacttttccggcaatcatcacatctgttgcacgcttgattccgtcggccaacgattcgcggcaaccgtacagattatcaaacttagatttcgttaccgagtcgtttacattgaatgccgggaacagcaatttgccttcttcctgcatctgatacaaacggtgtacgcctgtcgtagtctcttcagatacgccacgcacttcttccgccacacgatgccagcgagtactgtcttctgccaacactttcttcaagatggcattcagttctatttcatcctccgcgtgtacttccttatccaatacggcagcattattttcagcatcataacccacgtggatcatcattgttgcgtcaccgccatcatctacaatcacattcggtcccttaccgccgtcaaagctcaatgcctgcaacgtgcaccaccaataatcggcaagagtctcgcccttccatgcaaataccggtacaccggcagcagctatcgcagcagcagcatgatcctgcgttgaatatatattacaagagcaccaacgtacttcagctcctaaagccactaatgtttcaatcagcacagccgtttgaatggtcatgtgcaacgaccccataatgcgggcaccttttaacggtttggattctccatacttttcgcgaagagccatcaggccgggcatttctttttctgccaaatcgatttccttgcgtccgaaatcagcaagtgtaatatctgccaccttatagggcagagtagagaataattctgtagacatattgtaaatcatttatatataatggatgcaaagatagaacattctgattagtagggcaaaagctatccgtttttttatattataataactagggaggctgtcagcatctcggaatattgttttatatttgcaacagataaaacaacttctacaacattctaatgaataataacgaatcttctatgagaaattacgaaaacaaaacaaaggaagatcttttggaaataatcgaacaattagagaagaaaatagattttctttcctctcattcttcttctgattcttcctctccttccaaagaacgttttcgtgataaatatagtacccggatactggatgctcttcctgacatgctcaccgtcttcgaccatgacgccaatatcatagagcttgcttcttctccggcaactaatcacgtagaaggtatcagccccaacaatatcactaccactaacgtaaaagacattctgcccaaagaggcttatgaaagtgtccgcaagaatatggataaggtgattctcacaggagaaagctccacagccaggcatgaattaatgctagacggtgttttacatcactacgaaaaccgtatctttcctttggataaaaagtatctgttgtgtatgtgccgtgatatatcccaacaatgggaggcggaacagacgaatgcccaacaacagaaagaactaaaggctgccagaatcaaagcggaagagtcggaccgattgaaatctgcttttctggcaaacatgagtcatgaaatacgtaccccgctcaatgccattgtaggattctccaaactaatcacttacgcaacatctgcggaagagaagaatcaatattcggaaatcatcgaacgaaattcggaaatgctgctgaatctatttaatgatattctggatctggcatcgcttgaagctgattctctaaaattcaatatccgcccgatcaaattaatagatatctgcctgcagctggaacaacaattctggcataagacgcaaaacggtgtcaaacttattttggacgacgtagatacggacatgtatacttcgggagattggaatcgcatcatacaaattataagtaacttgcttagtaacgctacgaagtttaccccgaaaggagaaattcatttcggctatcgggaaaaggaggattttgtagagttctacgttaaagatagcggcatcggcattccggcagcaagaattgccacaattttccggcgctttggaaaggtcgacgattttgttcagggaacaggattgggattaactctttgcagaatgttagtagagaagatgggtggacgtatctggttgcgctcccaggaaggccagggaagcagattctattttaccctacctttgattcgtcaataaagatcgattaaggacacaaatatctgtgtccaggcatgaccttacatgactatttacaattaaatatagatatacagaaaacgcggcttgttggtaacaaaaccgcgttttccgcatatatctatgtttgaaatatattcatttattccttagcagccggagcactaagcatttctttatatttcaccggatcattcagaattttcatcgcttccttcaaaccgtcatcatccttcaactgctggatgatattaccacgttggtaatagtaacgcttgataatttcagtagcaatcatcttctttatatcagatgagaaataatccaagtcgcggtcaagatcatgatttaacttcttctcaagtgccttgaactcctctgaagcatcatccatatacccttcaaactcggcagcttctttcaacgttttcagaattttctcgctttgctggtcatatttgaaatcagctttcttcaccaacgctttaaaatcattataatcggcatctgtcacctcaaacttctccggagcaacgatggtaggatgtttcaaacaatactgagttgcataatcaaaaatcagattatcgcgtaccagatagaagaggatattcggtaatttctcctgtttgataacaatatccggcattacaccacctccgtcgcgtacttcacgtccggcagccgtatggaataccttagtcaaactgtcaggaatggttcctacacttccatcttcattacgatgcttgtagtcaatagcctgtacacaacgtccacttggaatataatatttggaggtagtcactttcatcgttccgccataaggcaaagagcggggaacctgtaccagtccttttccgaaggtacggttaccaacgataacggcacggtcgagatcctgcagagaacctgataagatttcggaagcagaagcggttccactatttaccaataccgcaatcggaatatccaagtccaacggctcgcgcaatgtcttataagtgttactagcttgtttgattttccctttggtcgttacaatcacctttccacgcggcaagaaataattcgcaatttctactgcttcatccagcaatccaccgccattactacggaggtctatcaccaacgaagtagctccctgtttcttcaaatccagaaatgctttcttaaactctttggaagggttgccggaaaaagtgctaaggctaatgtaacctacattattatccaatacggcagtataaggaatcgccggattctgaatagactcacgtacaatcgtgaactccatcggcgtacgtccacctttctcattcgggcgctcaatctttagcttaaaactggtacctgcctgtccgcgtaacatctggctgacttccgcattattcttaccggcaagatcctgtccgtcaatctccatcagtatatctcccgctttcagaccggcttttgcagcaggcgttccctcaaaaggttcagaaatcatcgaacgttttagtttcgtattataagcaatgtaagaacccatcccaccaaatgatcctttaatcatctgctccagttcactctgatcttcttccgggaaatattccgtataaggatccagcgtataaagcatattatcgattccttcccgaatcgttttattcggatcaatggtatctacatagaacatatccagttctttcacaatcgcattaaatatatccagattctttgcaatctggaaattacggtcgtctccactcttgaaactaaagaaagcaactgttgctatcaccgctactgcaacaatagctatctgcctgttcagcaattttttcatacctctttcaatctaaatgagtcgtaaaagtagctcaatcctttgttattccgccagaatcctgttaatatttaacttaatttcatcccaacgttcctgtggtatcgttgttccgattacctgaataacatttcccgagagaatagaacctattttcgcacatttatccaacgaatatccgcaagtcaatccgtataagaatccggaagcaaaataatcaccggcaccggtagtatctaccactttttgaaccgaaatggccgaaacctttatttcttctgtccctttgcggatataagaaccatttgcccccacttttacaatagcaatactgcatttcttggcaatcactctcaaagcttcctccggctccttgccggtaaaggctttcgcttcctcttcgtttgcaaagacaatgtcgacatatttgtttattaacaaggtgaagaattccagatcattagccacaatgttataactagccatatcgagacaaatctgcaaaccggcttctttagccagttcaatggcgtgaagaatcatttcgtggtcctgaacaagatagccttctataaataggtacgcgtaacctttaaacatatccaaggtcagttcctctgctctcaaagaagccgctgctcccagataggttccgaaagtgcgctctccatccggtgaaataaaagtggatgccacaccggaaggcagtcgatccgaggtcaataatttgtcttcaatcttatttttctgcagattttcacgaaaaaattctccataattatcatttcccacttttccgataaaccctgttccagcacccaaacaagccagtccgaggatggcatttcctgctgatccgcctgttgccaagtgagttttcatctgtgaaaattttgtgttaatctgctgtaacttagcgtcatcgatgagctgcatgcttcctttgggtaaacccatttcatccaaaagagtatcatccttcagggttgcgagtacgtctaccagggcgttgcccaatcctattattttgtccattcctaatattttttttgcaaagatattgcatatttcaaaaaaacctagtacttttgcatcgcaattgagaaaaacattcttccttagctcagtcggttagagcatctgactgttaatcagagggtccttggttcaagtccaagaggaagagcaaagttgaaaatcttgattgcaaacattcttccttagctcagttggttagagcatctgactgttaatcagagggtccttggttcaagtccaagaggaagagcaaaaaagaagccacctagaagggtggcttttctatttattcacctttcttatcatccaaaggactaataatatatcttgtgggatttggctcagaacaaccatatctctaaaagtaggtacatcatatcggtacaaaaaggaattaaatagtgattaaccggtgtggtattgaatcacaacagaatcgaataaattctcttattggatatttattttccatttttccatgtcccccttcatcttttctctgtctctctgatgaataaggagtttgcgggtgaagggtaacaacttcaccatctcttctcctgtagcgattagtttcaaaaattgtttcaaggcttgaaacaatccgtttcacaccgagaaacatctagtttcaaatagggttgaaactaattacgaaatagctttactaatcttgctcaatggtggaatctgaaagtagcaatttgacttgattcacgatgaagagaaggtgaaggggcagctattcacctgcaaactccttgtttatcggcaatacagaagaaaagtgaaggagctggaagaattgaacatgttatagaaaagagcatcgaattgttcaaaacccatatggaatgagtcgaatcgtctattcataggaaatgattttaattgggcatttctatttatccgtttgcctatccagattcgttccacttgctatttttatttcgttccattatagtggaacgaagtaaaagtagctaattgagataatctgactaggcaataaagataatttgtttgggcaattaaaaaagtcttattggcacacctaacggagatacggtggcgaggcatgcattcgtttagctcaaaactgtgcaggaacgaacttttttggtataggctgccctgaagcacattacccaaacttttaaactgttccccgatttttcagactaatctaaaatttatccccgctgatttgctactactccaaagacagcggttcagtttgaaaacggcggcttagtctgaatattggggatttggggatcagtttgagaacaaagacgaaagaataaggggaacctcccggataaatccattagtccccctctggtattggtcgtacctcatcgtttcttgataaaggcaagtagttacacataaatgtaatgttttcgaccttttagccgtcagaccaccactccgtcccatttgacttgcctttaaagtttaaataacattagatcttggcgaaaaatagcaaaccacaaccaactggctgctatggattcgccgtgacacttcatttgtttaatgaaaaaatagacgaggcagtcctaccgtttggatataaaccacctcgtcttggggtcttagccgaacctgtttatttctctatcttcattcatttcaaatcggtttaaatacatgaaagaaggaaagaataccataagagatgtccagccggagatttcttgattgtatggcaatgcagccaagaggggtattctcaagcaaatcacacgattgctttgaggagaaagcgggcatatcttttttgttctttccatttataacaaatgatggtttgcgccctattacaaaccctatatatacaaaaaaagcggtagggcatttgcctatccgcaagcgagggagtcgaagccctatacgcacaaacaggaaacaccccccgcatatcgcaaggagcattttactgtttcatgtgcgtatttgaattttcgacttttcgcttgcacagaaatcagctaaacgctttttttcttcaaaaacataaaaacatgtcgatctacgacagtgcaaatataagaaattattaattcattcggttctcaatctcgttttttttataaaaagtcatctttgagaagccctttatacattcttgaaacaaatttaagccgttgccaacgtcaatatactaatccgtattccttccacattcactaggcaggaagcacatgccagagtagtagaaccagtggtcaacacatcgtcaactatcaatatgtgttttccggcaagtgttttgggatgctgaagctcgaagataccttccacattatcccgacgttcaaacacagatttacgcgtttgcgtttccgtatttttcttacgcaatatggattctgtatcgatggggattcctgttacagcagcaataccacgggcaatccactcactctgattataaccacggatttgctgttttttcttatgaagcggtatggggattatcacatcaattccctgaaaaaaattggaagacaaaagttcggcagccatataccgccccataattgcaccaatttccttttgtccaccatatttcaaccgatgaagaatcaaccggaagtcgcttcctttctcataaaagaaaaaagaagtagcccgttccaaagggatttgtccccagaagagccgttctaccggattatcttttcgaagatgataattagtacggggtagattgatattacatactgtacagatacattcttcaccctttgctaacggtcggccgcaaacaacgcagcaacggggaaatagcaaagataagaaggaactaagccagtctttgataagaagtgtgtgtttcataataatagaagtttgaagttgcaatagcacctacatattcaatggagggacttctgctaggagcttctgaaagaaaggatgaagattcccgttcgttgcgataatatgatgtccttctatgaaatgatcctcaccataaaaatcagtcacctttcctcccgcctcctgaacaatcagtgctgccgcagaataatcccattttccgagaaatgcttccatccaagcatcaaaacgcccaatagccacatagcagattgcggcagcagccgagccattcattcgaataccgcccactaccccataaagctgatcgatgagatgaagagcagtctgtttatattgcagatgattataaggtaattctgtaataacaaaggcatcttggatatcctcaacactcgatacatgaatttcttcaccattcataaacgcttttccacctttccaggcatagaaacattcatcccggcaaacctcataaacgacgcctaaaagaagttcggtacggctacgtaaagcgatggacacacaataaggagcctcatcatgaatataattcgtggttccatccaaggggtcaatcacccaacagtagggttcatcctgataagtggcagagccttcttctgtaatgaatcccgcttcaggcaataaagcagtaagggctttcaccactcgcacttcagattctttatccacataagacacataatcgtgtgcatgtttttccaccacacgctcacggcggaagttctttcgttcttctttcaaaaaatatccaacttcggtagcaatccggcatacatcagttgtaagctgcttcaaatctaacatttattattcaaattaaaaagtgcttcgaagttatagcttttccggcaaaaagcataaaggaaaataatattttcgtgtttgatacgcaaattaatgagataacatcaaaactattataaccaatatttaaaaaaacatctaaaaacaaggccgactcattttcttttatgagccgacctttctttacttttacatcaaaatataaatgtattgtcctttattccttaatttataacaacattacttctgaaccacaattttcaacttacaggtacgtccatagagtaatgccacaccgtcataagtgagtccggttatgccagctcccgaataggctggcccctggcttcctaccactcctgtaggagtagctattttacatcctccggcaactaacgcatcggtatcatttgcggcttcaatgacatgaatgacaccatatttgcccgccgcagtaacaaaggcaatataagaaccgtcttttatctgcaaactacaaggatcattcggatatccatcagacgcattgactctttgcattaacatatcggcacctcctttagctatactttccaatacattcaacgcctcaaaagtcttgacgtccgaagccgcgttcgccatcatcacatcaataccaagatcagtaaccttatcatcaggtataagagtaaacaacgttttgttggtagcaacacctgccggtttgatccagtcattcacatcataagctctccctatcggccctccattaattcttgatgcactgacaaaggagaaacctctgtttttaacggcaacaaagcttggatttctccatatattgatgaaagcaaagtctacgccatttgcctttgagccatatcctttaatttccttcaagcttaatacatgtttctgcacaccccgtatcattattccctctatggagaaaatataaggttgatccggttctgttgaatgttcccattcaggcgccatttcgatatcgttgaaaacaagcgcaacattattgtcaacaccctcaagaccttcgatattgataatcttttcctctttcaacccctctatatcttctaccacaatcttgattccattggtctctttattgtctacgacagttttcaggataaattccatttccaacggattgcctgataccggaatagtcgtatattccttcaggtcacccagtactttattacacaatgtatgttttatagacttaatgcccacagcagaacgaatcaccacagacagagaaacctcttcatcgggtactaaaacagggaaatctgatggttcggtgaatatctgggatggaagtttggttatctttttaataggtattaccttttgtgccgtttttgtcaaaacgtccgttgatgttaccagtatcccggctgcttcacgcgtgttgaccttgacattcaagtcaaattcaagtgtcatatcagtttgcaaggtatctatctttaaacgttgacgttcagtcgcgtttatctcttcatattctccattctcatccatcttcaacaaggtagcatatatgctatgtatacccacagctgaaaaacttctggcagatacagtcaccgtcgagttatactccaccacatctatctcggaaggagaagttagttctacagtaggtggcggatacgcgttgtcgtccgaataatcggactcactatcactacaatttgtcaacaacaaaccccatggaagggcaagtatcaggatcattatatttttgatatattgcttcatgaccgttcattttttattttaaagattcgatttgtaattgaaaacaatgtaaatctccgcttacacttgtttcggttacccccctaaaagcccatttatgtgaagtcaggacaaatatacaatactcggagtctctatttctattttccacttctacgaaagaataggtatcagaagttaagttagaagtaattgccgactcaagattaggcaataacgcacgtttaacagtgcctaccagaaccgtctgttcgtttacctttttcttgaaaacgtcgacagccggagctatcaggtcttcactatttaatgatacagaacagaagagcatatctattccgttcactgcttctgtttttgtttcaagatatctgcaatcgttttttactacatattgtgtcatttcggaaatagtagaaggaaaaagagccgtactgccgattatctttttctctccgttactatagctgacaggtacaaacaccggcactttcttgctctctctagcagtctccgtacccgtatttatgattgcagtttgcccatagacagcgttcgtcctgtccagcaatgccactgaatgaacagtgtttctgatagatgacgccacctctttataactgcaagagctaaataaattttgctctgacaagtgcgcataaaccaatacgttagttgttctgaaccggttccattccggaatatcttctcccttgttatcctcatcactacacgaaacgaacaggcaagagatgacacatataaatagcagatatagatagtttgatttcatatttcattcattttacaaattcaacttcagcaaacaaagccctgtggtcagaaacttccggattagataaaactttaaacgacttcactttccacttattctgtggaagtccgaatatataatcaatcttgattgtcggctgatctgcgggataggtgaatgtatcatcacagattctctgccagttcttcattacctcacaaatcacattagagtcggtccgggcattaaaatctccccccagtagtgtcggggtatctcccgtaccaatccgttcattaatctgttcggccattgcactccttatcaggtctgtcgaatgatccaggtgagtcgttcctatcctgattacgtctgaagttcccggttcctgaatatctacatataatagcgtccggggttctttggccccgtctatcccttcaaaagttttgttattgatataaacaaaaggatattttgaaaggatagctactccatattctccaccaccagtatccatcgctttcccgaatacggaaaacaatcccaactccgcagccagttgagtggtgaaatcctgatttttgttcctttttgtgttgtaatctatctcttgcaacattacaacatccggattgtatttcctgataaatacagcatactccttcaccgagtaaccggtcatttccccggacatccggcaattatagctcattattttaagagcctgcgcatacgtactttgatacgcaaaaaagaaaaggcatacccatacaatgggctttaaaagtgctttcataaatttgtttttgttattagattaagtttacttattcaacggtatatgtatattctgatatttttttaaagctaaccggtgttatggattgcatcacctccaacacatagttcaaatcgttccctttacaaacgaagtcgtacgtaaacgaagcaatcttttcgtttttaactgtaatctctatatcaaaatgacgcgagagtgttgtaagcacctctttcaatgatgcatttctgaaaataagccgattgctcttccaactcgaagcatcatcgtgatatctatcagtttttatttttattacattactccttttttcataaactgcagtttgcccgggaagcatttgctgcataggcctgcggctttgcacatgcccgatatttatacttccttcgtcgagtgtagttttgattaccttatccgaagcgtatgcttttacattgaaacacgttcccgtcacttgtattttcacattctcggcaagcacctgaaaaggggatttcttgttttctgctatctcaaaataagcctctccttccagcgtaacattcctgttgtattttgcaaactgttccggataagtcaatttagaatcggcatttaaccacacccggctaccatcaggaagtaatacgagtagcttctccccccttacagcacagacctcccgataaacaaggtttgcctcattatgactttgatagaaattatatcccacacctatcactagcaaaacaattgcacaggctaccgtccacttaaagaacaatggcatccttattctcctgttctttcgtttttcttcccgcatcacggcttcctgaatattcttataaatgcgatattcatcaaaaggaggcaattctctgtcgcccaattcgagctgtttgccttctattatcctctgaatgtcgtcatccatatatttcccgatgccgtcaactacttcaaagtcctgatttgtatgtttcttttttgatttcatatttcaatatctattagtaatacacactgttacaaaaaagtattatacagactacgttaaaccgtgttaattcaaaagaacgttccatatcagcaaaaagtgataaaactacatcatacaataaagcaacaataggctaagctctcccactgtcgcgcgaatctgcttcaaagattggctatattgaaatttaattgtattgatcgaaagattaagtttatcagctatttcctgattagagtattttcccgaaactttcatttcaaaaaccttgcggcgttgcggcgaaagttgctcaagagcttgctgtatgatgttcatttgttcttgtttaaggttttcgttttgagaattgtcttccaattccaaaaccattgaaagacaatcctcaagcaaatagatatttttctttgaatctctcaacgtattgagcagatcgttcttcaacatcgtaaaaaggtatctgtttatgggttttgtctcgtcgatctcttcttttttcagccagagttttaagaataagttctgcacggcatcttcagccagttccttattcagcaaatatttaaatgccaaagaaaaggtctgcgccgcatacgtcttgtatacaatactaaatgccagctggttcccctctttcagagccttaaccaaagcttgggcttcatcctgtgagtatttctgggacatcttaatcattttaaatatgaaaataaaaagcttattatatcaagtccttactttcaaatatattaattctttctgatatagcatgattcgcgagcaacaaatgaaacaggcctcttatttatttcaccagtctttgatatttgctgaataaaaaggtggagaatgataataatccgtcagttgttgaatgaacatcttttcgagtatccttccgatcagttacatttacccaaccttcttctatttcttttaattcatcttcaagttgcttctgatccacctctacaccttccccgaccgctttgatgaatgtattgatatacacctcccagcgctttgcataataatcacttatcagtcctgcccacgaacgactggcataatcgttcaggcttccaccccaagtagtaatcaaattgcgagcattcttttcataatagtctttcaactggggagaatcccccatcttccgtgcatcatcaatccatttatccagcgaacagtaaggatgaaaggcattcagcttatccaaatcattcaatatctccttcattttttcgccgcaagctttcaaagcctgataatctttagcttcaaccatcctgtcaaactccattttcatatcaagaaagtagtttccaagcacctgtctgcctacagttatcaaatccaggcgaaaagcatctctccggtcagaaggtgcttcgttcagttttctccaaacctctagtagttcaacattgctatacacattacttgtccgtttttcactgttcttattcaatgcagggcgatacccgggtaaagtacccaatgtgcgcggcacttgtgcataaatgtcattgaataatcgtttccaagcatcgcgcacaggctgcgacacgcatcccacatgcctgtcagccagacattcaatccatttattatcatctacattcaggttccatgctttctcaagaatgtattcgtagggaaactgcatcacatccaacccttccagcgtagagccgattcctttaaggttgcctccaccgttaatgagagcattctcaagtcgtgcgccactttctttgacgttacctgtcaaagttgtgtttcccccgaaattgcccagataacaccaaatatagggctgattatgaaaatgctctgttcttttccataattcaacattttcacaatgataatcaagtaatatcattttattctgtggcactcctgtcagcaaagccttcattcgctcggaagtccatttatctttatcaaaataaaacatccacgtcatttgcatccattgggctttgggatcggcagccgtcaatgtagcgtacatatccgatgctatcttccgcaaatattcgggttcgaaactgggcgggtcaacctcgttgaaaggatctaaaccataaatatgatcggttccgaaaagttttttttgttcatcaagaaataacttctgaattttcgcaaacaaagcatcgttagggttcagaaagttacaacggtatgcatcagcaaagccagcccatttgcccaaatgttgaatatcggcctcgggatagatccgttttaaatcggcaggtacatgtccggcgaaggccggtaatacgggcttcatattcaattcacgctcacgtgcgagtatttttttctgcaagcttacctggtgttccagccattccatcggcaacggaccgttccaacgatctatgttagccatccgatgccagggcagatacggcggtcccgtgaagtaagagcgtatttcgatgtccgacattcccattttcgaccagactttatgccacacggcttcctgtccggtaattgccaaaggcatatttataccattaagggccatccagtcaataaagcgctcccactctttccattgccaccaaggcatcgtgtaaccatacgtgcagtaattcaggaaaaaacgagtatccactctcgcttccgaaacgaccttctcaccaaccatcggcaattcttcaggaatttcaacggctatatccgcataccatgacactgtagtgagacagtaatattttaagtaatggttcagtcccatcgccattgaattggcgttgtttccaccgattacaattttatcttttacggactctattgtaaagcagtctttctctcctttcaacttttgaaactgaaaactctcgatgtatgatggaagcaaacgtttcaataatgcttccgcaacagctacgtctttgtctttagcctgaagaaccaacgacataaacaacataaccagacacgtgtatacactttttcttttcattctgatttataattttatatagatttttctttttaacaaaacatatcccaacagcccattgaacaacaggaaaaatacaccgtacataaatgaaccgaagtaatttccgaataacgggttaagcaaattactgaatacagccgtatggatatgccaatgcacaagcaatcctccggctatacaactaaacacataaattacaagcggattcgctccaaatgcttcgaaaaacgaaaaccactttttattctgctttacatcaatgatataaagcagcaatgccaatgacaatgccgcaatcccacaagtaagcaaaacgaacgaaggagaccacaaacgtttgttcaaaggacaggcatagcttaacaaatagccgacaaacaacagagtggtacctataagaaatagattcagcatccggcggtcattgtctttaatatcgatgattatctttccgcaaacaaaaccgatcatcacttgagacacagcgggaatcgtactaagtatcccctcgggatcgacaaactggcggccctgaagatacatgtggttagatcctaaaatagccgaatcaatcatcccgacgatattattcgcactcttttcaaatccgtttccaaataactgaaaaataaagtagacaatcagcaagataatagctaatggcataaaacgcttatgcggtattgttacggccaataaggctgtaataccataacaaatcccaagccgttgcataactcccatcaaccggagctgactcaaatcaaaatagttaccactatcgattgatgtaatgaaccactccataaccagacctataaatattaataagagacttctttttatgattttcgcaatggccggtcgacactggaagttatacttacacaaggagatgtaggtcgaaatacccatcagaaacataaacatcgggaataccagatcggccggcgaaaagccatcccacttggcatgtgcaaaagcggcaaagttatacccgcactttcctgtattgttgaccaagatcatcccggcaacagtaataccccgaagtacatcaagcgaaagtagccgtttgttcggattcataatatttgattcttttaattacttattatatataaaatagtcgttccggcagctaacactatccctataagcgattcataaggtatcagcttcagacgttccttaaagttgagttcgcatacgcctcctgtcgcatgaaagaacgagccatgtggcaaatggtcaagaactgtagctccggaattaatcatagctgccccccaaaccgcagaaatgcctatagccaatatcgtttcagcaaacgaagaagaagccagtgttgctccggctgttgtcgatgcggtagccgccgacatcaacgcgcctgatataggagcaatcaatgcatcactaatatgagcatgatccaatcctgtaagaatccagtctttcaaagaagagttctttatgatgccggcaatagttccggttcctatcaacagaatagctaccacagacatcttttgcagtccatacgctatactcggaagaatgtttttccattgtttcatacagatagcaccacataaaccacctaccggcaacgctatcaaaggatcgatattgattcctgccgcaggacgtaatgccaataacacaatcgtaacaacaggagcaatcagactggttcttaacgaaggcagatttctctcttcctctttatcctctgtttgcatcatcgtttttttgtttttcactgtttgaggcatcagacggacaataacaaaaacagtgaaaaacaaaccgatcactgccggtaaaatattggcaaacattacagccgatagatctgcattaaaatttccggctgctataatggtgttcgggttaggtgatatgatatttccacatttacctcccccgatcatagcaataagcaatacagatggagacaggtttagacgcttgcctatcgaaagagccaccggcgcaacggttatcacagccacatcaataaatacgcctaccgtacaaagcaacatcgttgcgagtgccaatgccataaatacccgtttttcacccattttgtttataatcgcattggagatgaccgtggtagctccggtttgtattaatatgcctgacaagactccggctgtcagaatccgcaataccgccggagttacctctttcactccttcggtcatcaccgttacggtctcatttaaagatagtcctcccaacaaccctccgactatcgctccgataatcagactgtatgtcggagaaagctttcttatgattaacagtatggataatgaaagcccgattaatgcgcctattgctgtcattgagtattatttagtaaattgttttatgattctcatcacttgccgcaccgttctctctatgttttctttcgtaaactccggttgcatcgcttcttcaagtgttaccggaaaaggttgaataggcagtacggcagtaaaccccatcctattaagcgcttcggtggcttcgaccgctccccccaacgctatcaccggaacctgacatctctcaccgacacgtaagattccgtccagcgcttttcccatacaagtctggcgatccagcttcccctctccggtcagtatcaggtctgcctgtcggacgacctcctcgaaacgaagcgttttcaatataacttctattccggattgcaattctgcattcaaaaacggaagcagaccgcctcccattcctccggctgctccagcaccgggaagctgcgatatatccatatttgtatattcctttatcacctgtgcataatgccgcaacccattgtccaactctatcacttgcaaactatttgcccctttttggggagcatatacataggccgcaccctcttttccaaaaaatgggttactaacatcacaggcaatcgtaaatttactttccttcaatgccggatttaattgggaaatatctatttgatggacttttatcagattttcgccgacaggctccaactcaccgtttccgctatctaaaaagcgtgcacctaaagccttcagcatacctattcccgcatcattcgtagcacttccgccgatcccgataatgaattcccgacacccgcgttttaatgcgtcagcaaccatttctccaactccataagtcgtagtcttcatgggatttcttcgatttgaatcaatcaatggcagaccgcaggccgaggccatttcgataatagccatcgcaccattgtttacgataccatacgatacttcaattggcttcatgaatggatcatgtacccgacatgacaccatttgggcatgaagggcggagcataaagcttctgtagtcccttcgccgccatcagctatggggaaacgtataatctgacagtcgggtaattcctcctgaatcgctttttcggcagcttttgctatctcaaaagaaccgaccgaacctttaaacgagtcgaatgccaatacaatctttttcataaaagctatcacttatttgttttctctattaaactcaatgcagccttgaccgggtcatcaaacggagtcgtactgttgctccagggagatgtaatccattgctcctcccattctcggattttattccggtcttttgtgaaatagagctgtatacgagggatatagtagtctttaatcagcccgctccagaaacgggcagcataatcctcctgaataccaccccaacttgtaatcaagcgtttggcatttgcttcataagcatctttttcctgaagagttgttccgctattgcgcgcaagttccacccattcttctaatcgatataaaggatgagaagccaatagcctgtcaacgtccatcaacaaatcaacagtttgttgcagattacgttgcgctgcgagaacacgattctccgaatcatctttcagggcctgcttataaaaattttcagctttagccgctacataatacgaaacaaactctatgaggtcgtttctgtataattcagagcttttcagttcgtcagcgcaactagcatacaaacgtatagcctgtaagtaatcatcactaaggtcgattttactgatccgccgttgatcgggaattacagtttgccaggtaaaacgggggtatgaatataaagaactatatgctgttttccgaaaaagcttccaagcttcctccatggcatcgggatatcctccataacgggcctcacagtatatcttcatccaatcgtccaggtcgatactatctgatgaccatcccatatcagctaacagttcgtaaacaacctcattgttttcgagtccttcaggggcagaaccgaacccaatcaagttacctttatttgcggcacgtaatgctttgaccgaggaactagcatacatgtccaagtctcctgtcatggtgtttttcccaccaaagttgggtacatagctgaatatccatttctttccgtaaaatccatcatgtactttccatgtttgttcggtgctccatacccatttcggataatcattgcccaaatcaatgataatcattttatcatcaggtacattgcttaacaaggctttaagcgattctttatcccagaatgaatgttgatatccgaatgtccatccctgtgtaacccaaacggcatccgggtttccggctgcaattgatttatagatcgtttctccatactcggccaataacttatatttcgcttctttatcttccttatcgataggcagttccatctcattaaaactgtccgagagataatacgtattttctccaaactctttttcccactcttcgacaaacagtttgcctatctcttcgaaaaaaggtgaatccggtggcaatacataagcgttgtactcttcatcaaaaccaccccaccgcatgtgccggaattgtgtgtcgggatgtatctgcacgaatccttccggcacgaaacctgcaaacgcaggcgctatgggctgcatccccaactcgcgcatacgggtcaggatttgatgctgcaaagcgatttggttctgttgccaggcatcagataagggaccgtcccacttgttcagattgcccatgcgatgccagggaaggtgtgcaggggcagtgaaaaactcacgggtttcttctttgttcaatcccatacgcagccatacccgttccgcaatggcttcactggccacggtagccaagggcatatttacaccataaagagccatcctgtcaatttccttttcccaacgctcccagtcccagtaaggagtagtgtagccgaatgtacaaacattaaggaaatagcgcaactcataaggggacacctgttcatacaattcataatcgggccacggcatcaccgacgttatgtgttcaccgctccatgttttcatactcttgcaggcctctttcatgtacgtatgaaaagcgtaacagatagcaacggagctacttccccttagggtaagccggccgtcgcttgctatcacttcgaatatatctttaccgtcggatggttcgatatattcaaagtggatagactgtgctctttccccaatctgacgttctattaactgtttggcgggggtgataatatccgtcttgggcttgtggcatgagcagaaaaaaagcgttgttgaaatcagtaaatacttgattattgtatgtatcatagaaaatcataaatgttataagtgagtatcaatattttttcttcgatgcttctttcacatattccagttccgtaataatcggtaaatggtctgacaaaagcgactgaacagtttgtgtactaatcacacgccatcctttttgcgggtaagcaaacaagtaatcgatcttaatcacaggtttccatgccggcattccaaaatcatcgttgcttgcagcaaaccagctatccataccacgtattgcttccgagtaatgacgcgcattgaaatcacctcccaaaattacaggatatttataatttttgaaatgcccggtaataaattttatttgctccgcccgtgtttcttgagagttgacgtccagatgcgtagaggtaaaaacaatggtatcattacccatttcgaataatccctccagcatggcccgtctctcatgctctttgaccggatggggcagcattatcttttggacagaaatatatggatatttacttaacatcccaataccgtaataaccggtagaataatcaatcgtttttccgtaaagcccaaacatccctgtatgataggcaagttcggatataaaatccttccccttctgatgcggggtacgcttacggtctgttttgctatccacttcctgaagcgccacaaaatcaggcttgaaggatttgatgtgatgagcaagttcctctaaagatgccagttcgccaaatctcaaattataggtcattacccgcacccgcagagtatcttgtgcagaggcaacgcccaaagtcaggcataaaaacaataataaatattttttcattgaatacatggtttctattttttaatgattacttttcccagcccggattttgtcctaacagaggattcttctgacgctcgggattaggcacgggccacaaataatgtttcgttgcgtcgaagtagcgtgctccgccttccgcggtagacttttcgtagataacatcaccaaactcatctactccggtatcgggatatgggttggcgcccaaatcgttcatacaaactttcaggctgggaccggtgatggcacgtccaaagcgaagttcgccttcacgccaacgcatcacatcggcgtatcttgttccttcacctgccaactcaatgcgacgttctcttctcaattcggtttcgagatccatcccccatgcgctaagttcgtcaaggttcatacgatgcatattcacacgatctctaagcctgttgatggagtaatcaatctgtgtttgtgtcagtttcttgccttgtagttcgaaagtggcttcggcataaatcagcaagatttcggcaaagcggatgacattgagattcccatgtccacccacacttgagccggccaaatcaatatcgttatactttttcagatagaaacctgtacggctatttgcccccacacggttattatcttgcaatgaagcaaaacgaggcagattaaatatctcgttggccttatccgtatcaggatcaccgtcatctcctcccggccatttgtcacccggagcatataaagtcatcttcattctaggatctctgttctggaaataatccacataatgctcttcaggcgacttgtataacgatgaggtctgcacaccggtctttttataatattccaatccggtttttgccggtttaccgtctgtacacagataagcatccactaacgacttcgttggattgagacgtatatagtctgtcggactgcaagtttcattgggtagactttgtgtacggatttcaggtacaaaaaggctatatacgatggcttcgatatttttcggttcattctcgacatccccttcgtgatgaaatagtttttcgtattcatacagcccatagggactgttttcgatgatatattcactcgtttttgcagccagttcccacctttcgttttgcaaggcaatacgtgccaatatggctaaagcgccccagcggtcaagccttcccagtttatcgcccgtatacctttcttcaggcatgcgctctgccgcccatttcaaatcctcgacgagctggtcaatgactttctctctgggagtacgttcgatatatgcatcttcgggctggatgacttctcctacccaaggtacatcaccccaaaacaccgtgaggtaaaagtacataagcgcccggatggtttttacttctgcggcataaacgtccttcttattttgagctacctgcgctttattatagttgtccagaaaattattgcagcgataaatatagctatacgctcctgtccaataggtagtgaaggggaagccgtcagtataagagtgcttgcctcccgaaaccttacttagtccactagtaatattcccccacataacagtttcggccgtcgattcgctccaattcacgagatagtctttttgtaaagcttcgtaacagggaggcaaggcatttttaagctgatcttcattcacccagaatgtcacattgtccggctcgttagggttcgttctatccagaaaatcgctacatgaggtaactataccaaataaagcaatgattaaaaagtattttgagtatttcatctttatagtcgtttaataggttagaatgttattgataatccaaaaacataggtttttacttgcggatagacatctccgctggtggtcctcacttcagggtcataagccccgaagtaatcggttttagtaaacaagttatctgccgaagcatatactctaaggctattaataccaagaggtgccaccatccgggcaggaaaacgataacctatctgaatattcttcaggcgcaagtacgatgcatcttctttccagtagtcactaaagagcctattgtgctcctgcgactgataaagtctgggataagaagcatttggattcataggtgtccatctgtcaagatgctcttttttagggattgaatagtcattgataaatgcatgccgagcctcatcctcaaggtaaccggcaactttgcctacgccttgcaaatagaaactgaagtcaatgcctttccattccaaaccacccttgattgcataggtgtaatggggctctttctcgccaaacaccactttgtcgtagtcatcaattactccgtcgggagcgccgtcaggaccactgatgtcccgatacttaatatctccgggctgtacaatgccgttttgtgacgcaacaagaggaaattttggtttctggtacttacctgtagttgtattcactgattcaaagtcatacacttgcgccagcccatcagtcagataaccatagaaagcacctatcggatcaccgacccgacgatacgaaccggaagccgtactggtcagcgactccggagttccacccaaatcggtaatcttattacgagcgtccgacagattgaacccgagattgtaatttacatttccgatcttatcacgccatgacagattaagttcccatcctttgacatcaatcttaccaagattgacataacctacgttactactggaaaccccgacaatagccggaacatcgggacgaaccaatgcatcaatattttctttcttataccaatcaaagtccacattcagtctattgttcaaaaaactaaggtctaccccgaaattaagcatgcggatggtttcccacttgatgtcgggattaccgattttgttttgccaaagtcccataacaggtgtattagaagctccgataggataagactcttcggttatgataggtgacaagtaggggtagtaattaccgggaatgttttgatttcccaactcaccccaggaagcacgcagcttacccgagctcaataccgaagtagcgaactccatgaatttttcacgtgagaagttccatcctgccgagaatgatggaaaatatccccaacgattgcccttggcaaatcttgaagttccgtcggcacgcaggttagcttcaaacaggtatttaccgtcaaaagcatagttgacacgaccaaagtaagaacgcaaagcccactcgtcttttgttccgctattcataaaattaatcattccggcactaataacgtgaatatcctcaaccatcacattatcacgcgtagcccccaacgtacttctattttcccactcttgcgaaaatcccaacaatgctcccaactcgtggcgtcctatggtcttattaaagttcagggtgaattgcaacgtttgggtcataacgtcaagatggctttgtgagatatagtccttggcatcttcatttgctttcaacgggctaccgtccgagtaataagacaacatcttcgggttaaactcatccacctggcgggtatatatattagcagagtactgcatacctacgttcagtccgtctataattttgagatctgcattgaaaataccattgagcacacgtgttttccgttcttccattcccgactcataggctacctgcaaggggttacgtaccgaaccgtacgaccagttctcactatctaccatccggccattctcatcaggaatttgccacatgacgggaagtaacggagacatacgctgtgacaggcggaatactcctgatgtgccgctataacctaagtcctttttatagaaatcgacatagctcatctgtccagtcagtttcagacgatcatacacctccgtgtttacactgatacgcgcattatgtcttttggaactatatccgtcacctacaaccagtccatcctgatccaggaaaccatacgacataaaaaatccggttttctcgcttccaccccgtgcacttacattatgccccgtttgaaaagcccggcttttgtatatttcatcaatccagtcagtattggaatattcgttgggatacagtcccgaatcatatttatcgaaagcctcttgtgtatagggcttggaaaatccggcagcactcatggcttcgttggagagttccatgtattcccttccgttaacaagttcgggcaatgctgtgggagtctggaatccggcatatccgttatattggaatactacgcgctctttcttttctccctttttagtcgttacaagaataacaccgttagcggcacgtgctccataaatagctgatgaggcggcatctttcagtacggatacgctttcgatgtccgaaggattcaataagttgatgtctcccccggctactccatcaatcaagatcaaaggtgctgtactactgttaatagttcccgtaccacgaatgttgatactgggcacagcacccggctgccccgaagaagaaacgatactaactccaggcaacaatccttgcagccccgtagttacgttagttataggcctgttctcaatagcctccgctttaaccatagatacggcacctgttacattcactttcttttgcacgccataacctacaactactacatcttccaggctgacagcattctctttcatcactacgtttactgtcgttgctttcgctatgacgctttcttcacggtagccgacgtatgagtaccgaagtgtacttccatagggtaccttgatggaatactgaccattgatatcggtgattgtacctgtagtcgagccttttaccgatacggtggccccgatgatcggttccgcattctcgtcagtaactttacctttcacatacagttccttcttctctccttgcgaatcaacaggttcagttttattttgatattctttattataaaataaaatactgtcatccaggaaacggaacccaatgttagtcccttttagcaaaagagttagtgctttgtttacatctgtgtcttttacctccaatgacactttcctactcgtatccacaaattctttgctataggctacattcatcgatgccttctctgctatctgactgatagcctctttaagaggaagctctttgatactaatcgatattttttgctgttgtgcataaacaaaagcagtgacaaatatgcacattagggttacaatacaccttctgccggtggatgaaaaaggagaatctttttccataatattagtctttaaagttaatagttcaatatctattagctaatacacaagagatattaaaaagtattacggcaaataagttaatgaatattaattcggaaaatataggagaacttgccggaaatcaatccatacttgataaaaagaaagaaaacacttcaaaggtatcgtttttaaaagaaaatataaagggggggatatcgtattttctcatttaatgcataaattagtgtctttacctgaaaaagaatgagcaacatccacctcacatatgagtgattccaccagaactcggctcagtctgaaaattttagggatttgattcagggcaatcacacccttaaaaatagattcattcccggtgcaaaaatgagctaaataatcatttatttttagacataagaacaaaagaacataaatgctgcgctttgaagcttatttctgttgcttgttgaactgctattttattttttgttcttatgttcttctgtttgtattaaattctcatttaactaaaaaccgtgcagtttagaactaattgtgttgaaaattaccaaagtcccaataaagtttagttctccaccttcacatccttcacggatggtaatcatctgtttgataggtgttttctgtgaacaaacaaagaaaagtcttttcttcacgctcttcacgccttcacaatccccacagtttatactttcacagcccgtaaccttcgcatcgacattgtcaatcttagcaaattgaacagcttgtatctaagaagccgactagagttgtccacctagtcgactattgttgtctaatcagcctaccatagtcatccagatagacaactatagtcggcgattaataaatagaaataaagtatacgataagacgatagtttatcagtaataagaaggatgattcttaatattgttaatgaataaaatatattcataattgcatagaaacgagttaaacgttgcgctaatgaatgggtcaagggtgagggatggtgagggtggatttataactttcgtattttttttatagataaaaaaagaagatagtatagaaaataataaaataaaaggttataaatctaccctcaccatccctcacccttgacccatatcttataataaaaagataacggggaatcttaaaaactcaatcatctttttcagatttaccacaacgtttccagaatactccattattttattcaaaacagtgcaggaatgaatcaatttttagggatgtgattgccctgaatcaaatccccccaatccccaagaattacaactaagcctcttgatacttataaattcatatagttggtgtcaaaaggcaatggtgtcaagtacgcctgacaatggaaatggaagcaacggagaaggtggaaacgaaggtggtggtgaagcaccggatccggcagcataagaaacggtattaatatgtaaaaaatcgggcttgacattgttcaagcccgattttttctattatctaaaatactactttctatcagttaacacctttatcgaatcccgttttataatattaggtttcaaaagaatctccgaatgtagttcagtttcttccaaaatcttctgcatcaacatttttacagcaataatgccaatattctccagtgattgtgcaatacgagttataggaggatttagatagtccagatataagttatcatcaaacgaaatgatagacatatcttgaggaattctcactttatgctcatttaatgctttgacggctcccaaaagaattgtactacttaacgcaaatatagcagtaggttttgtagtagagttcagagccaacttagtctcaatataaccattctgaatcgagaactcatttcctcttatcattgcgttatcttgataaccagcttcgcgaagcgcatcaagatacccgcgcacacgttccttagtcgttatagaaatatccggcccctgaatacagagaatcttactatgccccgattctaataataatttcgttgcctgataagctcctacataattatcagtagctacgtatggcaaattatgcttctcaaaatagcggtcaattagcacaatcggagttttagtactaatctcctcgagtttagaagggttttcaccggttggaaccaaaataatcccatctattttacgcgatagaagcgaatcaatagctttattttcctgaacaggatcttcgagggtatcgataagcatgacagtataattataacgttgtgcttcacggatgacaacacttgctatattggcaaaaaaaggattatctatgtgtggtacaagaagacctatagtatatgtcgtgttgttgcgcaaactttgcgcaactatatcaggctgatagtccaattctttaacggactgcaaaataacctccttagcagactggcttattctatatttctccgatttcccatttaagaccctagaaatcgtagagatagagtacccagttttctttgatacatcaatcagagttttcttcattactggtcgttttttgcaaaaataacattttatttgagaaaaaagcaagaaaaatattttgttttgaaaaaaatttctatatttgcacaaacgattgcgcatcgtttacgattcaattcgccttaatacttaatactcattatatggacacaaagaagaaaatcgtagtgataggtagtagtaatacggacatggttatcaaatcagaccgtctaccaaaaccaggagaaacaattctgggaggaaacttcttaatgaatcatggcggcaaaggagctaaccaagccgtagctgctgcaagactaggaggagatgtcactttcatatgtaaaataggaaatgacatttttggaaatgaaaccttggaaatgtttcacaaagaaaagatcgacactacttatgtaggaattaccccgcaggaaccatcaggagtagctcttatcaatgtcgacaaaaaaggggaaaactgtattgttgttgcttccggagccaacgggactttatctattgatgacatacaaaatgcagaacctgccatcaaacaggcatccatcgtcattatgcagttggaaactccaatcgagagtgtcacttatgcagccaaaatggctaaaaaagatggaattaccgttatattaaatcccgcccctgcccctacccaacaactgcctgacgatttattagccaatgtcgacattcttattcctaatgtcacagaggctgaaatcatctcgggaatgcacattacagatgatgaatcggcaaaagaagcgattcgttatattagttcgaaaggcataaaaactgtcattattacgatgggagccaaaggagctctcgcctatgaaaacaatgagtttatccacattccagccttcaaggtagaagcagtagacacaaccgctgccggagatacattctgcggcggattgtgcgtagctctgtctgagggcaaaaatctaaaagatgcaattatatttgcaagtaaagcctcttctatttctgttaccagaatgggagcacaagtatctatacctttgagaaaagaaatacaataatcatccttaattctgttattatgataaaacaatgttcaatccacggtctattgacaagtatgttgttaatagtattttctttgatgagcaatgatgctattgctcagaaggcaataagaggtacagtcctcgatgaagcaaatgaacccattatcggtgccagtgtccttgttaaaggtacaacaaatggttctattacaggagttgatggaaccttcaatgtaaaagcgaatccttctgatgtattggttatatcttatgtaggttatgcaactgttgaacaacaagtaggaaatcagacacagcttgtaatacacctgcgcgaagactcgaaagtgcttaatgacgttgtagtaatcggctacggctctaccacaaagaaagagcttacaggatcggttaccagcatgaagaaagatgacctcaatcccggaacattcaccaatgctatgggaatgttgcaaggaaaagtggcaggattacaaattatcaacccgaacggtgctgatccgacagccaaatatgaagtattacttcgcggaacaaacacactttccgcaggccaaggtccattaattattattgatggggtggcaggtgcagatatcagaaatatcaacttccaggaagtggaatctatagacgtattaaaagatggttcggcagctgctatttatggaacaagaggtacgaatggagtaatcatcgtcacaactaaacgtgcaagaagtggcaaaacggaagtttcttatgatgggcaactcaccgtgggagccgtttcacgcagagcaaaacctttatcggcaagcgaatacaaatctgttatcaaggagtatcgcccagaattggaaagttatatctttgacagtgataccgattggtttaaagaaattacacaaactccgttcagccataagcacaacttgtctatatccggaggttccgagaagttctcacatcacacttctttcaattatgaaaagagcgatggtttgcaaaagcataatagttccgagaagctaatggcacgtaccaatattcgtcagtcgttattagacaaatgggtcgatttggattataacctgaatatcattcatcgcaaatacagtccttcctctacaagtgcttttatgcaggcatttacccataatccaacagagcctgtttatgacgacagcgatccggatgccggaggatatagccgtatcaaagcaatggaatattacaatccggtagcgatcattaacgaaaggaacatggaaagtaagaatgataattatggtgcaaatattcgtgctactctaaacatattgcctataaaaggattaaaatgggagaattttgtttcatacgacaaagaacaatatgaaacacgtgaatattacacacattattatcctagtttaataggaacaaacgggcaagcctatattgaaaactatcaggaaaacgatacacaatatgagtctactttaaattactcgaatattttcggaaaacattctattcaggcattactcggatatacataccagtatacttatagcacatctgcatccatgactaattccggtttcgacttcgatgacaaccagactcataacatcgggacaggaacaaatcttactgaaggcaaagccagtatgtcatccaataaagaagataatacatatatcggattcttcggacgtttcatgtacaactacgatgataaatatcttttgtctgcttcattacgtcgtgatggttccagccgtttcggtgacaataataagtggggatggttcccggctgtcagcgtaggttggcgtataaataaagagaaattcctctcgaatgtcaaatggatcgatgatttaaaattgagagccggatacggagttaccggtaaccaagatttctcaaactacaaatctttgatgatgatgactacagccggtaaattctattacaatggccaatggattaatacttatcaacctgcaagtaatgcaaatccggatctaaaatgggagaaaaaagcagagttcaacgttggtgttgatatgacaatgtttgataaccgcctttcattcactttcgattattacaaacggactacttctaacttgttgtatgactatatcgtaccgactcctccttatgtgtataataccctgtttacgaatgttggaaaagtaactaacgaaggagttgaattaacaatatccggtacaccttttaacactagagactttacatggaacacctcacttaccgtttcgcacaataaaaacaaattggtgaaattcactaatgatgaattcactaacggaacgtacaaagtgggatggtctacaagtgcagcctgctacactcaacgtctgatagaaggacagtcattgggtactttctatggtcctatatggttaggaactgatacagatggaaaagatgtattgttaggacaaaatgcagacggttccgtaccggaagaacaatgggaaaaaattggctgtgcttatccggatgccactcttagctggagtaataccttcagatataagaaattcgacttgagtttctcactgcgtgcatctatcggcggagaaattctgaacaactatgcgatggaatatgaaaatctaagcagcatcggacttagaaatatctcatcaaactggttatctcaaacgaatttcacaagtacgacctataaatattcctccaaatacatagaggatgcttcttatttaaaactggataatgtaacctttggatatacctgggatttcacatctaaaatgataaaaagactaagattgtctcttactgcacagaatgtattctgcatcaccggttattctggtgtcgacccagaagtcgccctttccggactggaacccggtatggaaagtttgagttattatcctcgtacaacagaatttacttttggagttaatatagtattctaaaaaacaagattaccatgaaaaagacaaatataatattaagtttcgttatctgtatattattatacggatgtaccgatcttagcgaaactgtttacacaggagtagcgatgaatgacttctttaaaaacgagaaggaactggtagccaatgcaggtagggcatatacgaaattacaaggatacaattccgaacaaagtttatggacactacttttacaagcttctgatgaatgtgctgttcccgcttgtggtggttcctggtacagtaatggacgttatgaagaaatccagacgaataaaattccacctgcaaataaattattaacaaggggctggaactggatatttaatggtattgctgcatgtaatgaaattatttacgaaacggaattatcacctatccagtttgaaggaaaagagaagattatagctgaaatgaaaatactgcgtgctttctactattatcaggccatttcttgttggggaaacgtacctttcacaactgactacacggaaaccggatacccggaacaaaaaagtcgtgaatatattttcaactatctggaaaaagaaattaatgacaatatcgagttcctagacagggagccttcagatactaattatggacgggtcacacaagctgccgcttattgtattcttgcgaaaatgtatctgaatgcagaagcatggttcggtactccaatgtatgacaaagcagagaaagcctgtaaagacattatggatataggtgcttacagcattgaagactcttattccactaattttgatattaaaaatgaagattctaaggagaacatctttgtaatcctgtatgacagagtatatactagcggtgacagtaactcattttatctgcatacgctaacactggaagctgcatcacaagcaacatttaatattccggcagctccatggtcgggttttctctgccaaccggactttttccaaacatacgcagaacaagatcttcgcagaagtcagagctggttatacggtcctcaagtagacctaagcggaaaggatcttggtttcgaatatactcctgtcttccccgaagaaaaatattacaatagcaacggaggacgtggtacatacgacggtgcacgctgctggaaatggcattaccagactgatggttctttaaaagaatatacagttagtatggacaacgactttgccatcttccgttatgccgatgttgtattaatgtatgtagaggctttggtacgacaaaacagaacaagtgaggccatccaactggcagacttcaagaagattcgtacaagagcagggcttgatgcatatactacaagccaattgacgattgatgaactttatgcagaacgaggcagagaactggcatgggaaggatggcgccatgaagatatgatacgtttcggaaaatatctgaaaaaatattgggcacaccctgaccaaagttcagaaacttttagaaatgtatttccaattcctacggatattttaaatgcaaatccaaaattatctcaaaacaaagattattaaccacaattggaaggttcacatagaaaagtgtaccttccaacaaatcaaccctgataagtatgaaaaaaccaatcatctttttacttgttttaattactaacatcttatttatctctgcacagaagatttcaaagacagagttaaaagacaaaatagccggagcttggatcgggcaaatggtaggaaacatatatggacttccttttgagaacaagtttgtagatgaacctgccccggaatccagatttccattcggttacactaaaaacatagataaattgcagaagtataacggtgcattctctgatgacgatactgatgttgagtatatctacttactattaatggagaaatatggtgtagaacctacttatgccaatatgcgcgaaggatggatgtatcatatccgtgaccgtgtatggctagccaatagggctgcactcggattaatgcatcttggattcacccctccgttcaccggtgacgaaaatctgaatccccactggtatcagatcgaccctcaattgattaacgagatatgggcgtatacagcaccgggaatgatttcgtatgctgcaggaaaaagtgattgggcggcccgtatcacaagcgattcgtgggcggtatctcccactgttctatacggtgcaatgtacgctgacgcctttttctgccaggatatccgcaagcttattacacgcgctttaaaagaattgccagctgatgacagatatgcgatagctgtaaaagagatgattgctttatatgacaaatatcctaaagattgggtaaaagcacgtcaaatcatggctaaaaaatattacatagatgaaccagccatgacaaaaacaatctggaatgctaatctgaacggattatgcgggattttggctatgttgtatggcgaaggagatttccaacggacattggatttaagctgtgcaatgggatttgactgcgacaatcaggcagccactatctccggacttctaggagtaatgtatggtgcaaagtctcttcccgaaagtttgactaaacctatcgaaggatgggaaaaacccttcaacgaccggtatatcaatatcaccaggtttgatatgcccgatgcttccattgaagacatgattgaacgtacttacaacaaagcaatcgaactggtttgtgccaaaggaggaaaagtaaagggtgatatggtatatgttaaccccaaagcacaattcatcccccctatggaattctgtatcggtccgaatccggacttggaaatcggacagcctaccgattactcatttgcctgcagaacaaacgctgatttcaaatgggaactggtaaaaggtaaacttccggtaggagttacattccaaaacggtaaactggcaggaactcctacagaagccggcaaatatccaattacccttcaattaagcgcaaataacaagaactcaattactaaagactttgagttattggttaaaaccaagaatatagcccccaaggctgacactatttacgcaaatattcgcaaactaaacgaagaagtactcgattcttgctggattacctttggaaaaccgatgtacgcaacaaatgtagaagtaattaatgacggagtcaaagatggcgtaggatctgtattttattcattagcggccaaaagtaatctgcctaaaatagactatttcggatacggttggaaagaagagcataacatcaatatgcttgttttagatatgggctgtctggaagagttcggaggatggtttacttctctaaacattcaatatcttggaaatgacggacattggtatgacgtaggtaaattcaaatcaactccggcacttcccgaaaccgatattgtatttttccaacctccgtttgcacaatatgttttggaattcccggcagtagaaaccaagggaatacgcgtactaatggatgcaaaagtgcaggaacactggcataaatacacaaagaatgtatcatcattcatctctatcaccgagttgggagtttatgagaaataaaggaggagaaaaatgaggaaaataattacgatatgtattatagggctttttgctctcaacgtacaagcccagcctgtaaaaactttaaagttatctgataaagaacttttagataagattaaaggaggatgggccggacaaaccattggtgttgttttcggagcacctacagagtttaagttcacgggaacttatattcaagattaccagccaatcccctgggcggaaggttacgtaaaatattggtgggaaaagaagcccggattgttcgatgatatttataacgattgcacgtttgttgaggcatttgatgaacttggcctggattgttcacaagaagaacttgccaaaagatttgcattcgctgattatcatttggcccatgctaaccaagcaggcagatataatatccgccaaggtatcatgccaccggcttccggtcattggttgaataacccacatgcagacgatctggatttccagatcgaagcagacttcattggtctgatggctccggcaatgctgccggaagcattggatatcgcctccagagtaggccacattatgaatagcggtgacggtttttatggcggtgctttcgtagcagctctttatagctccgctttctatgaaaaaagtcctgaagcgattctaaaaaccgcaatctttgccatacctgaaaagagtacattccatcaatgtattcaggatgtaatcaatttccattctttgcacccggacaactggaaagattgctggtacttcctgcaagaaaaatggaactgcgatgtaggatgtcccaaaggcgtatttctaaactttaatattgacgccaagctcaattccgctttcgtagcattagctatgctctacggtaaaggagacttcaccaactctatcgatattgcaacacgctgcggacaagattctgactgtaatccgtctacagtcggcggtgtactcggcgtcatgtatgggtatgataaaatcccttcattctggttaaaccctttgaaagaagtagaagactttacatttgaaggaacgaatatgtcgttggcaaaagcataccaaatgagtttcgatcaagctaaacaactcatagtcaaaacaggtggaaaagtatctggtggggagatagaaattccaatcaaaaaggcggatgtacttcctttagaacaaaatttcgaaaacacctatccactttatagagaacgcaaagactgcttcctgacagatacatttgaatttgatttcaatggtaacggatttgttatctggggcaacatttgctgcacaagaagtattactcccgattatatcaatcgtgtatctacacgccacatcggttccgaggtgttcggattggcagagcccaatgacccttacgttgctaaagtggaaatatggattgacggagaactggaccatgtagcagctttacccatgagaaacacagaccgcaaagtagaaccagcctggaaatacctcatgaaagaaggaagacaccacgttaaaatgaaatggttgaaccgcaaaaaagactacattattcgtatcaacgacataatgtattattcagagaaaaaagaacatgatagattttactttaataaataagttaagatgaaaaaagtcctgattaacatcattctactatttaccttttccatatcgggaatggcacaaatagaatatggaaaaacagttgaaataagtaaagaggtactgctcgacaaaattaaaggaggctgggccggacaaaccataggatgcacctatggcggtcctacagaatttaaatacagaggagcgatcattcatgagaaaactccaataatctggtatgatgactattgcaaggacatctttgcagaagatccgggattgtatgatgatgtatatatggatcttacctttctggaagtaatgcaaaaagaagggataaatgcccctgccgaatcatttgccaaagcctttgcaaacgcagattacaaattatggcatgccaaccaggcagccagatataacatattgcacggtattatgccaccagcatcgggacattggaaaaataatccgcacgctgacgatattgatttccagattgaagcagacttcattggaatgatatgtccggggatggtaaataccgcctccgatttttcggacaagatagggcatatcatgaactacggcgacggatggtatggaggtgtatacatgggagcaatgtatgcattagcttacgtaaataacgacatttatacaattgtcacggaagctcttaaaacaatacccgaacaaagtaaatttcaccgttgcatcacagacgttattaaatattggaaacaatatcccgatgactggcgtaaatgctggctggaaatagaaaaccgccatgcttttgagattggctgcccggaaggggtattcaatgcatttaacattgacgccactatcaatgcggcttactgtgtgatgggacttttatatggcaacggcgactttttcaaaacaatggatatagccactcgttgcggacaagattccgactgtaacccggcaactgccgcaggaattcttggagtgatacaaggctacaaggctatccccgaatattggaaaccggcactcgaaagatgcgaaaacatcaaattcccctacacagatatttctttaagttctgtttacgatattaatctcaaactattgagtgacgtgctaaaagcaaacggaggaaaagtaaaaggagataaatactatactacaattcaaaagccaaagaccgtagcatgggaagtttcttttgaaggcttatatccttctgaaagaagagttattaaatatgatctcggtacagaaaaaacatttgagttcaatggcaagggagttgttttaatggggatgatcagacaagatgttaaagatagtaatgacaattacatcgccatcttggaggcctacattgacggcaagaaagtagaaaccatagaaatgccttatgactacataaaccttaattccgcaacactattacaaatataactttttaagtacctgagcaacaaaaagttgctcaggaatttgccatgtcagatttttcacctatcttagtgttgcaaatcaaaatatgtatcaaacccgacagacatggcaaaggtagcaattaaatccgagaaactcactccttttggaggaatattttcaataatggagcaatttgactccagactctcatctgtaatcgactcaaccctcggtatgagatgcaggctgtatggttatcaatacagcgaaatcatccgttcgcttatgagcgtttatttttgtggcggctcatgcatcgaggatgtcaccactcatctgatgtaccacctttcgcttcatccgacacttcgcacatgcagtgccgacacgattcttagagccataaaggaactgacccaggataacatttcctacacatccgacactggcaagacctacgacttcaacacggcagacaagctgaatacactgctcctcaattgcctattgtccacagggcagctgaaagagggcgaggggtatgacgttgacttcgaccaccagttcatagaggctgagaagtttgatgcgaagcctacatacaagaagttccttggttatcgccctggcgtggcggttattggcaacttgattgtcggcattgagaacagcgacggcaacacaaatgtccgtttccaccagaaggacacgctgaagaggttctttgaaaggtttgaacaaaacaagcttattatcaaccgtttcagagctgattgcggctcgtgttctgaagagatagtggaagagattgctaaacactgcaagaccttctatatccgtgctaaccgatgcagttcgctctacaatgacatctttgccctcagaggttggaagaaagtggaattgggcggcattgagtttgagctggcctccattctcatcgagaaatggaaagggaaggcataccgtcttgtgattcaaagacagaagcggatagacggcgaactcgacctgtgggaaggagaatacacctaccgctgcatccttacaaatgactacgagtcttccgagaaagagattgtcgaattctataacctccgtggagggaaggaacgcatcttcgatgatatgaataacggattcggctggaacaggcttccaaaatcctttatgggagaaaacacggtgtttcttctgcttatggcactcatacgcaacttctataaattcatcatggcgaggcttgacgtgaagaggttcggactcaaagcaacaagccgcatcaagacgtttgtctttaagttcatctctgtgccagccaaatgggtcaggacatcaaggaagtatgtgctgaatatctattcatgcaacaatgcttatgccaatgtgttccagaatgactttggataacaccgacaacttatagtcgtgattttgcgtattgcctcaagtcgcatggtggggtaaggggcatttatatgtctttatggtgacattcgatgcactgtgccccctttttactaacgatgcagattcttttcgcttctgtatcatattaggcgcgtagttgcggatttgaggataaaaagaaagtatgacattttctataattatgatttagaggaaggacctcacaaactggttattaaatggattaatccaaatgaaaaatatgccgttcaatgtaaagacatggtggtttattcatccacaccggcagagccaatcaatccttataaataaaagagagaagccatgaatagaaaactactcctattattagccttattattattttcctacggattgtcatcatgttcgtctgatgataacagtccgtccgaaagcgaacagaccgagacaccggaactgtttaccaaacgctataatcccgatcaaagtttttacagcaaaatattaggacaagaaatcaaatattccgtattactgcctcaagagtatctatcggaaagtacgggtaaatatggagtagttttccttctacatggctggggaggaaaccaaagttcatggggaccttcaggtctgaatattcaaagcatagctgatgcgcaaaccagcaatggtagtattcgcccattgatctacatcatgccggaaggtttcaacacttatttttgcaaccgctatgacggaaagttcaactatatggatatgttcattaatgaactcgtacccctgattgataagcggttccgaacaacagccagtaagacggaaagagctgttgccggattctctatgggaggtttcggggcattaagtatagcatcgcaacatcctgaaacattctcggtatcaataggattaagtccctctctaaatacagatgaacaatacatctctttgtcacaagacggttggaatcttcaatggggaaacaacttcggaggaagcggccagacaggaacaggcaggctgacaagctattataaaagccaatgtccgctacactttttcaaggataaaccaagttccacatttcaaacagtacggtattacatagactgcggtgatgatgaagaaagactatatgcaggaaacggtgaattacatactctattatgggacaaaaatatcaagcacgaatatcgtgtacggaacggtgcccacactgacagttattggcgtgaatccatgaaagaggcactgccttttatcgaacgttcattcaaaggagaaaactatccgcaggaaactctgaaaaaattcacagaagaattacatgctactaataaaaacataaaagtaggtaattccaatatcgaactatggttaccggatgactacaattccgaactaacttacaaagttctttattacagcaaaggagaaggtaatattgatcttacaacaaagaaggtggcagtggcattagattctcttatgcaaatcaaacgtatgataatcgcaggttttaatgtgaaagaaatgattctaaatgaaacaaatttttcagctattaccgatgctgtggaaaagacggttcatacggaaagcaatgcagatttcagattaggattaacctacggttcagaagctgattacttatacaatcagtcaacaggcaatgcccctgctatcaactttttctttgcagaagacgcagattttatcaacctttctgccgagaatcgtgccaaaatctattatttggacataacagacgaaggcagcaactacaatagcatctttactctgttcaatggattgcgaggtgcagaagctccggtgcaatatcgtgtcagaaacggactggatagtgaacagtccgcccaaacaggtatttattcaatgagttattatattggtgaacagttaataaagaaataatatgaagaagatactgttatatattatcctatttctatcaggtatagatggagcttgggcacttcccatagaaaaagaagggatgagtatttacagtccgtccctaaagcaagaagtctcctactccattatcttaccggaaggttatgaacattcagaaacagaatatccagtcttatacatgtttcatggaataggaggtgattataccagttggctcgaatacggcaacgttgcccgtgtaatggataaaatgataaaagaaggaaagattcaacctttcattatggttattcctgacggttacctgtcttattacagtgacacttatgatggcagttccctttatgaaactttctttatcaaagaactggttccatatatagataacaactatcgtactcgcaaggatattaatggacgctcgatcattggtttctctatgggaggattcggagcattatccgttagtttgcgcaaccgccacttattcggctctgtcgttgcgttatcgccatccatccgtacagaaaaacaatacatggaagaagggccacaaaaaggatgggacaatcaatggggacggattttcggaggagtgggaaagaatggtaaccagcgcctaaccagttactataagcaacattcaccctaccacattctttccaccctccgcaatcccgatttaaaaggatttggcatcatgctagatattggagataaagaaggtactctttgcgaaagtaatgaagaactgcaccgattattactggaaagacaaatacctcatgaatgggaagtacgttcaggaggacatgatttcacctgctggaatactgcactgcccaaagcattcagattcataaacgaatatttcaatgggaagcagtcaggaaatagtgagagtagtcttccgaatgagactccgtttatccaaacagccaatgcaacggtctattatccggaacaggctcaaggaagcacaagaaaatatcctattatctatgtacagggagaaatcaacgaacaacagcaaaaggttctcgtcagtcagttttatcaaatggtagatgagaataaaacatggcctgctgttctttgtttcgtaaaagctaacacagacctgtcagaaacaatttctgatatagaaaagcaactctccggcatcagaggttcccaacgtatgcgggctttaatcactttgggagataatattaaagaaggtatagaagctattcagagagaaaatttgtttaccggcatagtctgtgtaaatgccatcggcaacgagaatgatgctcaaaattttataaaagcagtcaactctcacaaaagatatcccagatgctggatggagatactacccgaatcaaaagaatatggttttagtagtaatatacatatccttttgaaagaatcggacctggaacatgagttccggtcaagaaaatgtaaggaagccaatgttttcacttattgggaagattggatactatatttaaataacagaattcatgtttaacaattaaatactaatagtatgttcacagtaaacagttatttattggcagttatattctgcatcgtaaccatgatttgttggggttcctggggtaatacccaaaaactagtttccaaaaattggcgttatgaacttttttattgggattatgtgattggaatggtattgttcaccatcttgctaggcttcactatgggtagtcatggagataccggacgttcattcctggaagatctgggacaagcatcaggagacagcattggttgggttatcttggggggcgtaatatttaatgcttcaaacattcttctttcagcgtctatttccttggctggtatgtctgtagcttttcctttaggagttggcattgcattggtattaggggtaatcgtcaattatctgggaattccaactggtaatcctttgcttttatttggcggtgtagctctcattgttattgctatcatttgcaatggagtggcttccggaaaaatgcaaaagggagaagaaagcaggaaaaacaacaaaaagggaattatcattgcattaattgccggtgtactgatgtctttgttctacaggttcgtagtgaaaggtatggacgtagaaaacttcaattctcctgctataggaatgatgactccttattctgccatctttgttttttcaataggcgtattactaagcaattttgttttcaacacattagtaatgaaatatccttttgtcggagaaaaagtcagctactccgaatactttaaaggaaacacgaaaactcatatatgcggaatgcttggtggagcgatatggggacttggttccgcgttcagctatatcgcatcaggagaagctggtccggcggtatcttatgcactaggacaaggcgcaccacttattgccgctatttggggagtatttatctggaaagaatttaaaggttcaacgaaatctgttaatcaactactggccttgatgtttatcttcttcctggttggtttgggaatgatagtagttgccggaaactaattattaaccttaaatagaacaacatgaaaaagtatttttacttattagccatgctggcagtagtactaggtacgactgcttgcagtgatgatgacaatcatcccagtacaaacattctggataaaccggaagttactgttcctgatgtaaaagagagttctgctgttattacatggaaagccataggaaacgcaacagcttatatttatagcttgaacaacggtagtgaacaaagtactgaccaaaatacaattcaactgacaggtttagagccggaaaaaagttatacattcaaagtaaaagctcaaaaaaccggatcaatctattttgaagattcagactatgcagaaatcacttttacaacaacctctgaagtaacagtttatcggatagccacttttgcggacgactgggataaatggtattacgaatataatgataatggtactgtaaaacgtgtatacaggttatatgaaggagaattggatagagaatggctctttgcttatgatggaaataatatcacagtgacaggtaagaacgcatataacatgactttaaatgaccaaggttatgttgcaacttttgtagatggttccaacacttacgaatatacttatgatgagaatggctacatgaccaaagttgaaaagaatggcaatattgcatctaacatcaccatagaaaatggaaatattatgcaatggaccagattttcagatggagtagagcagtttaaagttcagacctattctgccgtgcctaatgtgagcggagcacattgcatctatgcggaaagcagtggagctagtcgttggctggttgaaactggtctctttggaaaagcttcggctaattgccatacgagcagtggttggcaacattcatccagtacagctacttacacattcgaatatgacgagaacagttgtatcaaagaggaaagcaaaaactatgacggatatatagagaatttctattatacatatttctccgaatagcactttatgaaataactgattcatggaggtgtgtctagaagtctggcgcacctccattttttataaagttattagagactttagactgttatatccagtaaaacctctccccttacattcagcaccttaatcctcaattcatcgttcttcttctccagaatcatcaccgtagcactgtccatcttatatcctccaccaataataaccggataattattacccagttcccctttcggatggtaagcgtatttgtgagtatgtgcgttcaggctgatattgaaaggtgctttttctaataatttagtccaaagattcgcacagagattcttcccatcattgccataaagaggaatatggtgaataaggacacgtttctttgctttcttgaattctttggcagacagttcttttttcagaaaatcaacctgttcattacgcaattgagtaaaatcgttcaagccataatatacccaatggtcgtccggtttatcttctccacaatccaacatgacgatacgggtgtctccccagttaaaagaggcataagttttatctcccacataatcaaaatggtcacgcaagccgatagaataggcattgcggatttcatggttgccacgcataaagaaagtcggtatgcgatcgccacacactccttcggtcagttcactgataaatgtggttgcctgctcgtgatccacaggatcatccacacagtcaccattgaaaacaacaaaatcatatttaacatcctgtatttgtttacatagagcacggaaagtattggtatgttgatgcaaatcattaaaaacaatagcagtaaaagactctgtatcagcaacaggaagagtaaattcactgaaggtcgattgtgctgtatttccaaatacctttttatatgcctgataaagcaacatctcttgcgaacacacacgataataatatttctgtccgggctgcaagccatctatacgtattttatgcagcttgttattgcagaccacttgaccgtcaacaatcatacgcgcacgttccagccgggtagtatctgtgccatattccacccagcaataagaaggaacggttgtttcccacatcacagtaatgccattacccacaggattctgcaaataaggtttagtacggaatatcttgtctgccttttcagcggtacgcaattccacaagtatggggcgatggtcggaagccattggctcattaactactctcgcagatatgacagcaaatccggtagcgttttgctttgatgcggcaatataatcaatggtttcttttggatcgggagcaggataagtatgcttttccggattggagagtatttgaaaatccttttgcaattctttgatgaaatcggattcaggttcagcattcatatccccggctagaaaaagaggctttttataggaagcaatcaatgacttcactattttcaaagatttcatacggtcttcttccgttaatgacagatgagtacaacaataaatataatcctcaaattctgccagaatcaaggtgcgggcctcttctctaccaggtaaagggatggtttgtaaacgtagcggaacttgctttgtcaacagtccgattccatatttacctccttcaaactctatagcaggtgcaaaacaggcatgcatctgtgtacgttcagctatttcacccagcacatatttctgtccgctccgacgggtcatactgtctacctcttgtatagccacaacatcaggagaagcattatttatcacattggctacccgttgaaaattacaaatatcatccatgccgttcgcatttttgatattataagtcatcagtctcaatgtatgttgggcctgtaccggaaaaataaataggatgacgaaaatgagtaaaaagatctttttcatgttcttcatttttgggggttatgttaagttcccccaaaggtaagaaaaaaataaaaagccacaaagatacggattcatacctttgcagcctcttattgttaagaataacttttctctaaatggggggatgagaataaagctatattatttacaaggtcgatttattatcttattatttcttttgccactttgcggcagtatcccacatttgcggatctacgctattaaagtgccaaaaaccgatttgagagattcccagttcatcagctaattcaagtagcgcttccgtacttctggcatcacttgcataaaacagatgccgattaccatcagtaccatcatacagatacatgtttaccttttcataacataaccaggtaggagaaggcaaaattccatttatactgtcaggcacagattggtaaacctgccttcctttgatgtcaccagttacaacataatcatttgcataagcaggcagagccatcactaatttatcattcggaatgtgtttcatccagaaaagcatcgcctctttagtccatagataattagacgtaggtccaatgcccatacaatcatccctatgtttgagctcgggcttatctatcccaggtgcaaaatacatatcgtaacacatcactctaattaagtcgcaggtagtattcaaaactgtcggatcgtgaaacatcttagtttcgttatcctgatacaaagccggataaaaactaacgcaatggcttaatttctttccaacagcatggagttcttttgaagcaagtttcaggaattcggtatatgcatcctgaatatcagggctcaaatgttcgagatcaagatctattccatcatatccatttgcattgcaatcgcttacatacttctcaacaagtgcctttcttttctgtggcgtatcaatcgtttcttcatttccacctacagcctgatatacttcgatatgattctgatgacactcatcgataaatgatttcggaggattcccgaaaacgctaatggaactaattatctctttcactggctctatatccttaaaagagcttccatctatatagacataccaaggagctactttcttctcctgggtggtggaagagagtgtttcctgcttgcaggaaacactcgtcattaccaacattacacagcatatagctgttccaattatgcttaaatacctcattgaatgtaaagtaaactgttattcttcatcataattatacttcttatattctatatagtcatatttgactgtatatgtctttgcagtaggcttatctccttgccagccacctccatcagcaaaggtcatcattgagaatccaaatttaaactgtgccggagtataccaggtagtaaatgttttcgccacttcaccatctataatccatgccgcccaatatgcaccatctgcattaagtctaaggtcaatagtcaaagtgtgtttacccggatcaataggtacaccgtaaactcccatagcctctgtataacaacgtaccagcatctggcctggaacaggaggaaccgtacaagccgcacgatcattttcagtacccgagaaaacaaacatagagaatgacctttcttcagcgttagttgcagcgatattaccacctgccaaccatttttcacctacccctaccaaaggaacatctatttcccatgtatattttccagctcccacttccggactataaacgaagttattcccgttagatagattcaaacttccatccgcaatcgttcctccattgttagtccatccaacaggaacaaaaccagcttcctcaaagtcccacttcactgttgttccctctggttcgggaggaagctgaccttcgataatcggcttcattgaataatcataaggaacatattcaagataatcaaataaggcataattttcttgagttgccgcatgatcgcccataccataaagattctcgacactagatatagcacagaaataagcctcttcaccataatctaattgtgccctctttaaaactttaccatcaaccgaccactccgccagatatttcttattttctaacttcaaatccaatacaaacgtatgccaagcatcccccttaataggcgtgaattcagagaaaaaaggattagcctgactagtcacaaggcacagcatatcatctggtccggcactatgtgctgcacggtctgcagctgtaccggaacaaatttcaaaatccaattcatgcccatcatcaaaatataaaaatgctccaatactagcccggtcattcattccgaatttagggacatatatcctccattcataacgacctgatccgaattgcgttgttgtctgcaccttgaaacggtccccattagtaccttcatactcttcacctgcccgggtatagattcttaacgcttttccatcttcacattcgtcattatctacgatagtgatcggattgatccctgccacaagccccgtcttttgcaatccagtaaagtcaccgtaattataaatggttcctttatagccatcctgaataactgtgatggttcgaagttcagcacctttcgccgctatggtcaaggttgcactgcgttttgggccgttattcttatcagcagcaattgttagcgtaccattaccagttccttccaaaggagaaactgtaagccaatcaccacctgcctgatccactgctacttcccaagctgcttctgacgtaatatctacagtctgaacttcagtagaggagactccgaatgttaaagcatttgtggagattccgcatgcaacaatctctgttttctctttgaagctatcaccgcatgatactaaagaggcattacataatacacctattgctaaatataaatatcttagtttcataatgattgtttttattgtttcattcagttcttcaaattcggattaatagacgaatctacaaaaggacggggaagatacatcttactgtcattccacgtacctgatacggaaacagcttctttcctgaagactccgggagccacttcaatctccggatttaattttctgtattcaaaatgatctttaatgcgattcatgcgaaacatatccctcgctctagtggcaatatttccccaataatatccggctatttcccagccatgttcattataggcagcttctgccagatcatcatacgacatggttgtcttatagatatcccggtctgcaacaacagatccattggcacgattacgtacctcattcaataagttgacagcttccgtgatactgcctgtttttgaacgacccacagcttcggcataccagcaatatacttctgccaagcgaataatctgatgcgtcttttctccattctgattcatcgaaatcttcggattcgtataatcgaattcttctccagtggtcgtttctactttcttcatgaaacagggagcaacaaccacacgcggcgcttccggattggggtcttcccaccaatcacgcaacttagtttcattcttcaatatgattttcgggaaataagatgcatctttgcgtgagccttccgggaaatcataccagaatttaatttctccgttcgtatctccccatccaccgccaccataagcatagtctgccaggaaatcagctaaaggggcattggtaagtgcatctattcccaaattatagtaaacgccaagcaacacttcaggattattcttattatactccatcgaatatacttgcttgtaatcaggtaataatttgtagtagtaagtacctttcttcgcagcatcgattacttcttttgcctttgcagcggccagttgataatattctgttcctttgttcaacggccatcccgccattgccatatacacataagccaatgttgcttttacagctccttgactaacagcaatgtttaccccatttcttgcgtagggttctttagtataattagcagggaccattgtttctgcctttttcagatcagatacaatcagctcgtaaatttcaggaacggttgccaatggcatgttgtaattgatttcatctttcacaaccataggtacctctccccaagccattacaaagtaaaaataagaataggcgcgccaataataagcttgtccaatggctgcatctttctcttcctggctcacctccggagttcgtccggcattatctataatgaaattagcagcttttactaatctccaacgagctccccacaattcagtcacccaagtgttattgtccgaaacattataagtatctacctcacgcaacccctgtttattagctgcagggtgtgtagaaatatcatcacccatcactgattcgaaacctgcccaaatatttgcatacatatcactcgcaactttggaatacattccattcagagccaagtccagatcaccttttgaattgaagaaattagttaccgccaactgccctttaggatcttctgtcagtaaatcctggcaagacaccatccaaagtgctatcaatgctagtccgacagatttgaatattctatatattgttttcatatccatgtatagttaaaagattaaaagttaagtttcataccaaaagtgaatattcttggaacaggataagatcccatatccacaccattaaagccataatcggattcactgtacacttctgggtccatacctgtgtatttcgttaatgtaaacaggttttgagcactgaccgacagttgaatatcggctactttcgttatcttcttaggaatattatacgtaaggcttatatttttcagtttcacaaatgatgcatcttcaagccagaaatcggaatcaggatagtttctattatctgaatttttatgacttgcatacacagcatctgctttattggctactttatcccaacttttgtaataagcatcggataaagagatgaagcgatatacacctgtcatagatcccatcgcatagcggcttacattcagtctatcttgtcctaatgcagcattgataaagagattgagcgtccagtttttccaagtgaatgtattattccatccgaaagtccaattaggctcggcctgccctttagtaaccagatcgtcagcacccggattggttgtcaaacttccattagattgatgtttatacaagttggcgccctggtcattaaagtttgcccattcataaagatagaaagaaccaatcggataccctacttttttaatttgaatgggaccaccgccaatacttgtataattctccccaacgataaaatcactacctgccagatcgattatcttattctttaaataagatgcattcagcgatgtttcccaaccaaatatatctttgtctgtcaaaggagtagctgtaatggtgaattcaacaccagagtttctaacttcaccttggttgacccagaaagagccacctccgttataccgaggagcaggtttgcgaagcaacaggtccttagtatcctttcggaaccattcggctgtaaaactcaagcgaccgtctaaaacactggcgtccaaacctatgttatactgataggtgctttcccaagttacatccggtgtagcgagatttccagtccaataaccggtatggattgcatcgctaccataaccgtcataatttgtaggagccaacatacccaatgttgtgtaagcaccgatactttgattaccaacaacaccaaaactggctcttagtttcaattgctggacaatgttttgtttgctcataaagttttctttagcaacatcccaagcaacagctgctgacggaaaatatccccatttattcttcttctgaaacttagatgaaccatcggcacggaaagtacctgtcagcatatacttccctttgtaattgtacataattcgaccaagcccggatacaatagcttctgcggaatagccattctctccatcgcgtgtctttgcattttttgcattccaataaccaacaaattcattggctaaatcactaccgatcagttttagatttctgccttcggcaccacttgcttcaaatacagctgttgcagtcagatgatgatcgccgaaacttgtgttataagtcacattattggtattctgccagaatagattcatcctgctcgcattttccataccactaatttgtccgggttttgctaacgacgaggtgaaagaataactcggaacatgagagtaattagcagcaccctgtacagacaatgtcaaccctttcattattttgaaagtcaaatccatattagtattcaaagcatacacgtatgagtcaccataatttgcgacacgtgcaccataagggtttccgtttactgaattataagggtccatattataaacgcccgttaccggatctttcatttccatcgtaggagaatagttcaggaagttcataatgtcaatacccccattatgactgtgagtacgtgaagcattaattttggtagaaagtgtcaaccacttggtgagttcattatccaaatttatccgtaactgtgcacgttgatacttggtcgtgatggtcatggctgtcatattcagtacattggctgaaataagatacttatttttagccgttccacccgaaatacctaatttatagtcctgactaataccggtctgcaacatcaaattctgccagtcaatgcctttggagccattcttataggcttccatctcatcatctgcaaatgagataccattatactcctttaatgcagtcgcatattcataagcattcagtaagtcatattttttaagaatgttcgatacgcctatagccacatctgcataaatctgcactttaccttccaccccttttttagtagttaccaataccacaccattagcgccgcgtgagccataaatagccgttgccgaagcatctttcagaacttcaatagattgaatgtcggctggatttacatccagtccaccagacataataccatcaatgacatacagggggtcattgctggtattaagagaagtggtaccacgaacacgaactttaactgtaccacccggtaaaccatttacgctcgtcactgccacacctgcagtacgtccttgcagaatatcttccacccgctttaccggctgatccttaaattgtttggaagaaacagaagccacagcacctgttatatctgattttttcactacaccatagccgatgaccactacctcactcaattggttctgatcttcctgcattgtaatcttcaaactggtattcgttcccagtttaacctctttagtcacgtatccgatataagagaatgatagtgtagagccaacaggagcactaatcgagaactttccggaaatatccgttacggtaccagtttgtgcatctttaagagttacgttgacaccgatgataggttcattgctgtcgggatccataacagtacccgaatactgctttgcaacctgtgcataagtagatgtaactgctgcaaaaagaaatagtagcaagcagccaagcgtttttcttagattatccatatacttttcatttagttagaatataataatattagatttttaggaattttagatacaagtcaaggcattcaaaatgttcccaacattactccgccacctcttcattctacagttttaggatgtattcatagtaaatagtcttttttttaaggtttaatactattccgtatttagtgtcaactatgcaaatataggtgcaaagcgtggaaatagagatcaaataacatccataattagtccgctactgttcaaaaggatcattctgaatatcctttctagctatctaatgagctttgtggacaaaagaagatgaaatctattgtacagtttcataacttcttttatatttgctctatcaaaagaacataactatgtcaaaagcacacgtactaaagaggtattcttttctaatctggatattattctttgttctttctacaaaggctgaacaacaagactactacttcagacaaatttctttggaacagggattgtcacaatcaagagtgcagtgcatttacagagatcatcaaggagtcatatggataggtaccaaatggggattaaatagttatgaccaatctgaactgaaaagttattttcatgaccgggagcagcccaactcattgcccgacaatttcattcgttttattacagaggatcgtttaggcgatttatacgtttctaccaataaaggaattgccatctacaataaagcagaaaatcaatttcagccattgaaatataacgggaagccatttaacgcttggtcttatcttcaaataggtgacaatttcctgtttggaggagaagaaactttataccaatacaatctgacggataaaaatattacgacgatcttccccgacatcgatggagacaagttaaaatgtatcaatcgcatctttcagtggagtcccgatatgctgataaccagtagtaaaaaagacggactttggatgtacgacttgataaaaaagaaaatgtatcgatgtccatttgtaaaagagcgtgagataaacaccatatttgttgactctcaaaaccggctttgggtatcattctatggcaaaggaatagcctgctactcgaaagaggggaaaaggcttttcagtttatccaccaaaaattccgggctcaacaatgatatcatttttgattttcttgaaaaagacaaccaactttggatagctactgacggaggaggtatcaacatacttgacttccagactatgaagttctcttatcttaaacatatttccgatgatgaacaatccttgccgaataactctatctaccggctttataaagatcagatggacaatatatggataggcagtatacacggaggattattcgccatcaaaaaagtgttcatcaaaacctataaagatgttccactgaacaatcccaatggagttagcgaacgtaccgtggttagcatctttgaagataaggatacattgctctggattggaacagacggaggaggtatcaactcatttgaccaaaaaacgaatacatttcatcattaccctactacatacggggagaaagttacctctatcacagatttttctgaaaatgagctcttattatcatgttttaataaaggggtatttacctttaataagagaaccgcacagatgcaaccttttcccattatcaatgactctatttcgaaaagagaattttcatccggtgatttggtaaatctatatgctacaaaagataatatttacatattaggagcaaaagtctatatctacaacaagcatacccggcaaacatctattctctacgcgccccaaatagacattcaacgccaaatagctatgcaggcaatttattccgacgatacgcatctgtatctaatgggaaccaataacctgtttaaactaaacttcaaaactaacgaactatcttcattagtcaatatgaaagagggagatgatttcacatcggcctgccgggatgataaaggtaacttttggataggaagtaatttcggactgctcttctataataaacagactggaaaaacagaaaaaatacataccaacttgttcaacagtgtatccagccttgcctatgataaaaaaggaaaagtctggataggagcgcagaacatgttctttgcgtatattatcaacgaaaaacgttttgttatcctggacgaatccgatggagttccttccaatgaattgatatttacccctattcctgctcttcgtactcccaatctgtatatgggaggtactatgggactggtacgcattaatacggatattattttcgaaagcaattcgtctcctattctcaagctacttgaagtaaaactgaatggtaaatcaactctgaaacaggttaataataactgtatttcgattccttggaatcattcatcgttcaacattaaagtgattgctgacgaaaagaactccttccgaaaacaccttttccggtatgtcatcacaggaaaagacaaaatggtgatcgagagttatctccagacactcgaattgggtacattagcatcaggagaatataccatcagcgtatcctgcgacacctccaacggtgaatggagccagccgatagagatcttaactattatagtctcacctccttggtggaaatctatctggtttattatactatgcattttctttgcatttttagtggcaggagtggtcttctttagtttgataagaaaaaaagaaaatcggctgaaacgtgagatgcgggaacatgagaagaagatatatgaagagaaaatacgcttcttaatcaatatcagccatgagctacgtacccctttgacactcatctatgcttccctgaaacgaattctaaataaagaggtgaagcaagacgagctaccggaatatctacagggagcattcaaacaggcgaatcagatgaaagatattatcaacattgtgcttgatacacgcaaaatggaggtaggacaggaagtgctacacatctcttcgcatcctttacacaagtggatacaggaagtggcagaaacatttcaaactgcatctaaagccaaagaaattgaaattacatacgactttgacgacagtatacaatctatcgcgtatgatgacactaaatgcaaagttgttctttccaatctgattatgaatgctttgaaatatagtcctaatcagactcgtattgttataaaaaccatccgtacaaatgaaagtatacaagtacacgtacaagaccagggaattggattggataatgtagatataaagaaactctttacccgtttctaccaaggcaaacataatgagggaggaagtggtatcggtttatcttatgctaaaatgttgattgacttacatggaggcaggatgggcgctttcaataataaagacagagggggcacattcttttatgaaataccggctaatctacaagaacaagaagtatcatgtcctcaacattcctacctcaacgaacttttaagttctccggaagaagaagagaaaatagaatccggttctttctctctacaaggatactcactgttgattgtagaagataaacaggacttaagagaattcttaaaaaatgctcttaaggataagttcaagaagatctatcaagcagaaaatggattggtagcgctggaagttattaagcaacagcaaccggacattatagtaagtgatgtaatgatgccacaaatgaatggctatcagctatgcaaggaaattaaagagaatctgaatattagccatatccctgttattctacttaccgccagagccgattctgaaagccagatgttagggtacaaattaggagccgatgcctatttgcccaaaccatttgaaatggaaatgctccttagcgtgatccagaaccagatgagaaatcgtgaatatattaaatccagatacaggggcaatcaattcattctgtctccgcaagaggctactttcagcaatgcggatgaacaatttatgattaaattgaatgaaatgatcgatcagaatctgtctcaaccagatttggatgtgaaattcctgactgctcaaatggctatgagccggacatccttatataataaggtcaaggaactgaccggcatgggagcaaacgattatatcaatcgtagaagaatcgacaaagcaatcattcttttaactcagtctgacatgagcattactgaaatatcagagcaggtaggtttcacttatcaacgatatttcagtacgttatttaaagaaatgaaaggaatgactccttctcaattcagagcacaacacggttgcacccaacaacaatcagaatagattcagcactttagtttatcatttatatagaaattatacttcccggaacagagcgattaagatttccagtgcagatttggacgtttcatgatttgaaatgactaaaatctgatgagtagaataaggtattcgactacttttgcagcaagcaattgatagaaaacgaatacacttaaattcaattattatgagaaactactatttaactctgttactaatatgcatttgcggcatttgctttgcacaacaacagaccaatgacatcagtactaaaaatccgccaaacaaagaatggaacttcaacaatctggatggatggaaatacggacatcaggataacaacccggataatcaatgcatattagagaatggctacttacggatctttacccgagctaactcggtggatcggaaaaaggttcatactgtagaacggatttatacaacaggaagatatacctggcgtactcatatcccgcaaatgggaataggagatcaatgtagcgtgggttcgtggatataccatgacgaccaacatgaattggattttgaagtcggatatggtaaagacacagttcgcaaggagttaaatgcagctcccaacgaaatgattgcttatatgacatcgcaggcatatcctttttcttccgttcctgtagtaatcaagaccggatggcatctgttcgaaattgatctgacattaaaaaacgggaactattacatcacctggttaatagacaacgaacctaaacatgaacttcaactggaatttgggaaagacattgcattccatattttttgcagtgtagagaatcttaaatttattggagaacaaccggcacagcaggaaaattccggattgtttgatttcgtcagatatacatatcatgactaaatatcaaatagccctcgctacaaatctgtaacgagggtattttttagaggagtcattcctcctcttgctaatgttatgtttatgtgctttttatatctgaatatgtcaatcagataatccccctcactcggtcatcgaatgcagaaagtgcagctttcgctccttcgcccatagagataatgatttgcttataaggaaccgtagaaacatctccggctgcatagatacccgtcacattcgtacggcaatgtgcatcaatcatgatttcgcccggtcggttggtttccactatgtcgcggaatacactgctattcgcagaaagcccgatctgtacaaatacaccatccaactcaaccaaacgttcttcttccgttttacgatctttgatgcgcagggcagtcagtttatcaccatttcctgtcacttccgtggtctgtgaacttacaaacacttccacgttcggcaatgatttaagtcgatcttgaagtacactgtccgctttcagctcatccataaattcaaaaacagtcactttggagcagataccagccaagtcaatggctgcctcaatgccggaatttcctccacctactactgctacatgctttcccttataaaacggcccatcacaatgagggcagaaagcaacaccacgaccgatatactccgcttctcccggaacattcagtttacgccagcttgcaccagttgcaataatcagtgccggagccaggaatttctccccaacagaggtagtgatctgcttttgttttccaaccacttctactttttctactttacgatgctccagcaaatccaccggataacgcaacaagtgagttttcagattatcggcaagttcatttcctgtcgtttccggaacagaaattagattttcaatacccaccgtttcttttacctgtccgccaacacgctcggccacgatagctacacggagtcctttacggacagaataaatagctgctgatactcctgcaggtcctccaccgactacaatcacatcatattctttcacctctgcattcgctttggtttcgtcaataccatattgatcttccaacttggcaagcaattcgccaaattcaccacggcctacatgaagtaattttccatctgcaaagacagagggtactccttgtatcttcagtgcatctacttcatcctgataaagcgcaccgtctaccatttcatgcgtaatagccggattcaaagtagtcattgcattcagagcctgcactacgtcagggcagttcgtacaagtcaacgaaacataagtggtcagatgtatcgggcctttcagtgctttcacacggttgcaaacggcctcatcgggaaagttctttcctttgccgtccagattcaggatagccaaaagcaatgatgtgaactcatgtccgttaggaataccccggaatgtgattccggtacgatcactattctttaataaagtaaacttcaatgcttctccctcattcaccgagcaagtgatatgatcggaacaatccgctacatctcccagcaactccaataattctgttttgttttcgtggctggatgatacggatatatcaaaagtaaagtttgcctccagcccagcaaaaataccctttagttgttcttttaatgcagattctaacatatctttttcctttcatttttttaaaagaaaggccggcagcgtctctcgttaccggcctcccataatcaccattatcaagatctatcaaatcttacctaccaggtcaatgcttggtttcagggtagactcaccctttttccatttagccgggcaaacttctccgtcatgggtagcaacaaactgtgcagcttccaccttacgaagcaattcacttgcatcacggccaatattgttatcattcagttccaccactttaatctttccttccggattgacaacgaatgtaccgcgataagccataccctcttcttcgatatatacacccagtgcacggctcaaagcgccagtcgggtctgccaacatcggatattgaatcttgcgaatactttcagaagtatcatgccaggctttgtgcacgaaatgagagtcagtacttaccgaatagatttctacacccatcgctttgaactggtcgtacttttcagccatatccaccaattcagtaggacatacgaaagtaaagtcggcaggatagaagaaaagaatcgcccatttacctttcaggtcattgttggttacagtcttgaaagctccgttgtgaaaagcctgaacactgaattcaggaagttgagaatttaaaattggttccataatctttattgcttttattgttattaattgatttgacttataacatcagaaacaacgttttgttttttgtttctgatgcaaagataaaggcagaaaccccgcctttgcaaaaaaagcccaatcgaatatttctatgcggtgatagatgaaattaataaaagcattttatacctttgcaagcataaacaaaaatctggaaaagatatacgatcatggaacatcctcttgcccaattcttatattgccctgaatgtggttcctctcattttgaggtcaacaacgagaaatctaaaaaatgtgcagattgcggctttgtctattatttcaatccttctgccgccacagtagcactcatcttgaatgagaaaaatgaactgcttgtctgcaaacgtgccaaagagccagccaaagggactctcgatcttcccggcggattcatcgatatgaatgaaacaggcgaagaaggtgttgctcgcgaagtactggaagaaacagggctgaaagttaaaaaagccgtttaccagttcacacttcccaatatttatgtttattcaggtttccctgtacatactctcgatatgtttttcctctgcactgtagaagacatgagccatttctccgccatggatgatgtagcagattctttcttcctacctctctccgagattcatccggaagattttgggttggattctatccgtcgcggacttagcttgtttctagctcaatgccgctaagataatctcatcagcctgatagattgagagtatttcatctatagttatgtcccatttttaagatattcctccaaaacatcagataaaaaaaagatgagccatttttcagtagtcaattgatgtatttgtaaaatagaagttcatctcaaccaaatagatcagagtaattgaccacataatcttaaacaatcatattatattactataaatgaacaaaatacaacatattgtgttatctttgtaaccatcattaatttaatggccattaaattaactgccattaagatagcaataatatgaagttctacgaccgaaagaaagaaatggcgatactgtatgcagctaaaaagcaatcacaaacgagcgcttgctttactgtaatgaccggacgccgacgaatcggaaaaacagctctactcttagagtctgtcaaagacacccgattcgtatatatatttgtagcaagaaagagtgaagtcctgctttgcgcacaatatcaacctgtcattcaggaaacgcttggcattcgtatctatggagaaatcagagagttcgcacagctctttgaactgctgatgcaacattcccaaaaggaaaatttcacattaatcattgacgaatttcaagaatttctctatatcaatccgtctatcgtcagtgacatacaacgtatttgggaccaatatcacgcgacttccaaaatcaatttcattgtatgcggttccgtttattcaatgatgaaaagaatattcgaagaccgcaaggagccactatacggacgccttaccgcccgaatttctctgcatccattcaccaccaccgttatcaaagagattctagcagaccatgcccctcaattcacatcggaagatttgctttgcttgtatttgctgacaggtggagtagccaaatacatcaccctattgatggaagcgaaagcatttaataaaactgccatgataaattatgcgctttccgaaggctcaccatttctgacagaaggcaaagacatgttgatttccgagttcgggaaagactatgccaattatttttctatcctatctctcattgcagaaggaaaaacaacacaacgagagattgattccatcatcaataaaaacaccggttcctatttagccaaccttgaggatgaatattcattaatcaaaaaagtgaaaccgatgttcgctaaacctaatagtcgtgctacccgttattgcctgcaagacaattttctacgattctggtttcgctttattttctcaaacaacgcagtactagaaatggggaaaaaccatttactgatagaatatgtagaaaagaactatgaacaatacagcggcctactgttagaaaaatatttccgtgaacttatcgctgaagaagaggaagttaccgacgtaggtaactattgggacaaaaacggagaaaatgaaatagacctgatcgccctcaaccggtttaacaaaacagcacttatcggagaagtaaaaagaaatccgagaaaaataagtatcccggcattggaaaagaaaggagaaactttacataaagaattaaatgattataaaataactttcaaaggattctcattgaaagatatgtagtacttttgcataaacacccgattatgaaaaaagaaattactagactcatttgtgccgccatctgctgcacgcccattataggatttgcccagacaggtgataagttcacttcgactgacaacctttataaagaaggaaaagaacttttccaagaaaagaattatgcagctgctttgccggcattgaaagcatttgtaaaacaaaagcctgcagccagccttcttcaggacgcagagtatatgctagtcagttcggcttacgaactgaaagacaaaaaccgcatcgaactcctccgcaaataccttgaccgttatcctgatactccatacgctaaccgcatttatgcgctgttagcctcctgctatttctacgaagtaaaatatgatgaagcactggcactcttcaactctgccgacctcgatttgctaggtaatgaagaacgggacgactgcacctaccaactggctacctgttatctgaaaaccgataatctaagagaagcagccatctggtttgaaactttgcgtgccaacagccccaaatacgccaaagattgtgattactatctttcctacatccgctatacacaaaaacgttatactgaagcgttgaaaggcttcctccccttacaggacgactcgaagtacaaagcactcgtcccttattacatagccgaaatttatacgcagctcaaaaactatgataaggcacaaattgtagcacaaaactacctgtcagcctacccgaacaacgagcacgctgcagaaatgtaccgtattctgggagatgcctattaccatttcggacaatatcaccaagccgtagaagcattcaacaattacctgaataaggatcgctcggctccccgccgcgatgccctttatatgctgggtctctcctactaccaaacaaaagtctactccaaagcagccgaaacattaggtaaggtgacaactgacaacgatgcccttacccaaaatgcatatctccacatgggactctcttatctgcaactggcagagaaaaacaaagcacgcatggcttttgaacaggcagccgcctccaatgctaatatgcaaatcaaggaacaggcagcttacaattacgctctttgcctgcacgagacttctttctccgctttcggtgaatctgttactgccttcgagaaattcctgaatgaatttccgacttctccttacgctgaaaaagtcagcagctacctggtagaagtttacatgaatacacgtagctacgatgcagctttgaaatcaatcgaccggattgccaaaccaagcgcgcaaatattggaagccaaacagaagatactgttccaattaggaactcaatctttcgctaacgccgacttcgaacaagctctgaaatatctaaaccaatccattgccatcggacaatacaatcgtcagaccaaggcagacgcttactattggtgtggagaatcctattaccgtctaagccgaatggtagaagccgcacgtgattttaatgcttatctgcaactcaccacccaacccaataacgaaatgtatgcgcttgccaattataacttagggtatatcgctttccaccggaaagactatacgcaagcaagcaattatttccaaaaatacgttcaactggagaaaggtgaaaatgcaaccgcacttgccgatgcatacaatcgtattggtgactgccacctgcatgtacgtaactttgaagaagccaaacagtattattcgcaagccgaacagatgaatacttcttccggagactattctttttatcagctggctcttgtatccggtctacagaaagactataccggtaagattaccttgctgaaccgtctggtaggaaagtaccctgcttctccttatgccgtaaacgctatttacgagaaaggacgttcctatgttttgatggacaacaacaatcaagccattacttctttcaaagaattgcttactaaatatcctgaaagtccggtcagcaggaaagctgccgccgaaatcggattattatattaccaaaaaggagattacaaccaagcaatcgaagcctacaaacaggttattgaaaaatatccgggtagtgaagaagcacgccttgccatgcgtgatttgaaatctatttatgtagacctcaaccgtatcgacgaatttgctgctttagcaaatgccatgccgggacacatccgtttcgatgctaacgaacaagactcgcttacgtatgccgccgcagaaaagatttatgcacgaggcagaatggaagaagccaaaacaagcctcaacaaatacctgcaaactttcccggaaggagccttcagcctgaacgcacattattatctctgcctgatcggaaacgagcagaagaattatgatatgattcttctccattccggtaagttgttggaatatcctaacaatccgtttgcagaagaagcactgatcttgcgtgctgaagtgcaattcaaccagcaaaatatggctgaagcattggctagctacaaaatgctgaaagaaaaagcaaccaacgtagagcgccgccaacttgctgaaacgggtattctgcgttgcgccttcctattgcgagatgacatagaaaccatccatgcagctaccgacctgcttgcagaagccaaacttagtccggagctaagaaatgaagctctttattaccgtgctaaagcctataccaagcaaaaggctgacaagaaagcaatggaagactatcgtgaactggccaaagacacacgtaactcttacggtgccgaagctaaatatcaggttgcacaatccctctacgacgcaaaagaatatgccgctgcagagaaagagttgctcaactatatagaacagagtacgccacatgcttattggctagcgcgcagttttatccttctatccgacgtctatcatgctacgggtaaagatctggacgcacgccaatatctgctaagtctgcaacagaattatcaagggaatgacgatattgaaagcatgattgaaagcagacttagtaaattgaaagttgagaattgagaataaaaaaatagaaaagtatgaaacgatctcattatataataggaggactcgcattggctatgtcaatgccatcctgccttcaagcccaaaccacccaaccgaaggatacaacaatgacccgcacggtcgttgtggaacaagaatataacccggacattatggacgcctcgaaagtaaacgtcctgcctaaagtagaagaaccgacagtgagcaagaaagaagtagagtatgctacaacattctttccggccacttccgttccggcaggcctgatgcgcccctataccggaaaagaagttcaacccggcactaccccgggatatgtacgtgccggatatggtaattatggcaatttggatattcttgccaattatctattccgtctgtcgcagaaagacaaattgaatgtacgtttccaaatggatggaatggatggtaagttaactcttcccttcacagatggagaaaaatggaatgcattttattatcgcacacgcgcaaatgtagattacacacaccaatttaataaactggacttaaatattgccggaaacttcggattgagcaacttcaacttccaaccggaaagcgtaaacagcaagcagaaattcacatccggtgacttccatgcgggcattcatttcactgatgagactgcaccactgcgtttcaacgcagaaacaaatctgttgatgtatgaacgtcagcataacatgttcaatgaatctgaagccaatacaggtatcaaggaaacaatcatacgtaccaaaggcgatgtcacgggagctatcggcgaccaacaattaataactatcgctttggaaatgaacaatcttctctacaacggatatacaaagaatgtttccaccggagatgaatacttcaaaaactacacaacgcttcttttaaatccatattatgaactggataatgatgactggaaattgcatatcggagccaatgtagatttatctttcggatttgataagtctttccgtatttcacccgatatcactgcacagtatattttttctgatagctacattgtttatgcaaaagcaaccggcggtaagcaattgaatgatttccgtagattagaaagtatctgtccttacggtgaactgccggaggcaaataccactgctactttgggatacgtacaacgtccttatgatacttacgagcaaatcaacggtagtatcggattcaaagcaagcccttatccgggactttggttcaacgtgttcggtggttatcagaatctaaagaacgacttatcttatttaggttttgacccaagtaatattcattcaggttcttatctttcttttgctcaagacaatacagacaatctttaccttggaggtgaaatcagttacgattacaaagatatccttggaatatcagctaaatatacttaccgtaattgggacagcaaaacagaggaatatctgttggctgtgaaaccggtcagtgaaatgtctttcaatgtacgtattcatccgatctctgcttttaacataaatctaggttatgattacatcaaccggaaagaagtgaaagagtatgcaaaaatgactgcagtgaatgatttgcatatcggagccagctataatgtattcaaaggagtatctgtctatgcccaaatacataacctgctgaacaagaaatatcaatattatttaggttatcctacggaaggattcaatttcttaggaggattgagtttccgattctaaattaatgaaaggggcgtttccatttccggataacgccccttctcaaaaacttaaacttcaattattttgttgtcttcactacaaatccgtcaccaatagatttacaaaccttgtatttcttctgccgacagacctgttatctgtgaaatagtattaataggaatattcaaagccttcatattacgtgctgtttctcttttttcttccgcacggccttctgcgcgaccttccgcacggccttctgcacgttctgtcaatatattatctttcaatattacaatattatccaaatgacgataatatgcttcaagttcagttttcgtcattttatcgagtttcaatcgttcgcgagcctccgtcaaaccgggagcagtagcactatctggtatatcacctgtattcagataacaaatccattcttccaacggactcttggcaacctgattaaagtcattcacctttaatatataatattcaggataaagctgactgacagcatcgaccttaaacgtctgtttctgaaatggagttaactccagcacatcattctgatgaatccctctaaactccgttttaccatgatatactatatcctttccattgcctaatgaaaaatagacaatattgacgctatacactttacgtactttatcataaccttctccacgattaatgtactcggtcaccaatttagaagtaccaaacaacatacgttggaaataagcatactcattgttattctgaacttcaatcagaataagttctcctttagagttctccgcaagcatatcaacacgattatacttatcaaactcatcttcttgatttccttcactttccaacaatttctgaatgacaatcttttcattgagaagagtagtcagaaagccttcaagaactgcaaaattggctttattacgcaataagcgtttcatagcccaatcgaaacgaatataattactagccataggttcgtctcctttcccattttcttttttcatgcaaacaaaggtaagcagaaaatgtttaatatcaagtatatatatccgataaaatgactcatcctacctttatatagactaccgatcgtcccgctccatacttttttaaaatccctttttcaataaatgcattaatatcctgcaatgcctgtgtttttgtctttccaacaagtaaggcataatcctgccgattaatacatggattcttttccaagaatttatttaatcgctgcaagcacttttcttctgctaatggattcttcacacgaaaaggcgaatgataacgttgtaataccaattcagtctcaatatccttcttaaactgacggttgattctcaaattaatatctttaagagatactgacggtgaacgcaagtcttttgaatcagtcacttctttgttcacattcaaagaaagagtaaaataaccaatatcacccaattcaacggaaaatcccttcaaaagcaaatgtcttagttctttcgagatagcttctatgacacctaccacttgcgcatgaggcatatgctgaaatgcagtcacttgttctacaaattcttcggctgtataactgcctttcaaaacgacacgtgcatgcagtggtagttcttctccactcttatcagggttgggagtctcataaaggtcataattaacactcattacttattagtttttcattggaaaagattaatttctctcttccaatatattatttattcaatttactattcagtttccgtttgacagttgtcaagcgatagctcaacagttgtcaggcgttcgtttgacaactgtcaaacgaaaactaacttactaatgagacaaatgtacgtagaatatagagaaactaacctataccaattgatattttatttcctgcaataaaatgtaaatcttaagattttattaaattctccttataatataaggtagggagaatctttttttttacttttgtccccgaatattgtggtacaagccattataaaagaaagaattatgcagaaaaaccttgtcattgtcgagtctccggcaaaagcaaaaacgattgaaaagtttctggggaaagatttcaaagtcctttctagttacggacacatacgcgatctgaagaaaaaagatttcagtatcgacgtaaataatgattttgaacccagctacgaaatcccggcagacaaaaaggcgctggttagcacactaaagacagaagctaaagaggcagaaaccgtatggctcgcatccgatgaggaccgcgagggagaggcgattgcctggcatctgtatgaggtcttaaaactaaaaccggaaaacacaaaacgaatcgtatttcatgaaattacgaagagcgctatcttaaaagctattgaacaaccacgcgacattgacctcaacctcgtaaatgcacagcaagcacgacggattctggaccgtatcgtaggtttcgaactctctcccgtactttggagaaaagtgaaaccggcactctcggccggacgtgttcagtctgttgccgtccgtctgatcgttgaacgtgaacgtgaaatacatgccttcaaaacggaagctgcttatcgcgtcaccgccgtattcctcgtcccggacgcggatggaaagctggtggaaatgaaagctgaactggctcgccgtatcaaaacaaaaaaagaagcaaaggctttcctcgacgcttgtcagggagcgagctttgcaatcgatgatattaccacccgcccgatcaagaaaacgcctcctgctccgttcacaacgtctactttacaacaggaagccgcacgcaaactgggatataccgtagcgcagaccatgatgctcgcgcagcgtttatatgaatcgggattcatcacttacatgcgtacggactctgtcaacctttcggaatttgcaacggctggcagtaaagacgctatcatcaaaatgatgggcgaccgctacgtacatccccgccatttcgagaccaagaccaagggtgcacaagaagctcacgaagccatccgccctacttatatagagaaccaatccgttgaaggaacagcgcaagagaagaaactgtatgacttgatctggaaacgcaccattgcttcacaaatggcagatgcggaactggaaaagacaactgctaccataacgataagtggcagcagcgacgtatttacagctatcggcgaggtgattaagttcgacggtttcctgcgcgtgtaccgtgagtcttatgatgacgacaacgaacaggaagatgaaagccacctgcttcctcctttgaagaaaggccagaagttggaacatgggcctattatcgcaaccgaacgtttcacccaacgtcctccacgctatacggaagcaagtcttgtacgcaaattggaagaactgggtatcggacgtccgtctacgtatgcacctactatctctaccatccaacaacgcgaatatgtggagaaaggtaataaagacggggaagaacggcagtttaatgtcatgacattgaaagattgtcagattaaggatgaaaaccatactgaaattaccggtgcagaaaaggcgaagttgttcccaacggataccggcactgtggtaaatgatttccttaccgaatatttcccagacattctggatttcaactttaccgccagtgtagaaaaggaatttgacgagattgcagaaggagaagtgaaatggacttctatcatgaagaatttctatgataagttccatccgtctgtagaaaacacattggctatcaagacggaacataaagtaggcgaacgtattctgggagaagaaccgggaacaggcaagactgtttctgttaagattggtcgcttcggtcctgttgtacagattggtactgtagaagatgaagaaaaaccacgcttcgcacaaatgaagaaaggtcaatccatggaaaccatcactttggaagaagcactggaattattcaaattacctcgtacactgggcgaatatgaaggaaaatcagtcagtgtaggcgtaggccgtttcggtccgtatgtcctgcacaataaggtatatgtatcgctcccgaaaacacttgatccgatggaaattactttggaagaggcagaacagctgattctggagaaacgccagaaagaaacggaacgccacatcaagaagtttgaagaggagccggaacttgagattctgaacggacgttacggaccttatattacctataagggttccaattataaaattcctaaagatatcgtcccgcaggatttgagtttggctagctgtttggaactcatcaaattacaagatgagaaaggaccagcgaccacaaaaaaaggacgattcgcaaaaaagaaataaaaaaactagaaaaagagcaaattatataattaaatgtatatatttgctctttatcttttaatacacaaacttatgaagcaaacaaaattaaagtatttaatgataggagtgcttaccatagcttccatcagttgtatggacaaagagcgtgacttatcttgggagagaaggcatatgccaaaagaagcatacttcgacttcaacatgacccaagctgttgctttggatatcaattattgttttaaaagcgaaaattatcgtgtcctttttgacatttacgatcaagatcccattgaatactcggctgacggcagcgtgttccaaaaggacatagagcctatctaccgtgcagttacagacgaaaaaggcaaattcagtggagaaatgaatattccggcggacctctcggaagtatggttatcatcggattatttagccaccgtatctcctcttaaactaacgattgacgacagtcgtcagctttcatttaatcaagatgcatatatcactgccttacgttcacaaacggcatcaaaaaccagaggagtgaccgtgaaccaacatacctatctaaaagaatggcatgttcttcccgatgcagactgggataacaacggaagaccaaccaatctggagcctaaaataaacatacctccggcagacgtactatacaacatcaagtatgttttcagaaaggttacagtcaaagatgagagcggtaaaagcaaggttatgaacatcagtcagaattatccggagttttttgatggttccattaaaatgacttcagatattccaattgttaacccgaccgaagtaagcctcgtatttataaacagctctgctgcatggtacaatacagttggatattacacctatccgaccaacaatccgccccagagcaagagtgatataaaacaaataattgcattcccaaacacctctcctgtttacaagactttaggggtaggagcattagtgtgtggcgaagaaataaaactcaaatattggaatgaagagacacaggaatacgaagacaaatttcctgcaggagtcacaattggctggtgccttcaaggtatgggattcaagagtaaactcacctcagaaacagataaagacaaagtgggcgatatcataaaaggtatgggggcacgctactccaccaggaatctaaacacgaataatacacaaagaactgtatctctccgtgattccaagtccgggcagattgtagcagtaggattcgaagataatattgacttcgattatgcagatgccatcttctatattcatacgtcagaaaagaatgctattgacccgacattgcctccattgcctgaagaccccgaagcaatccccgagcaatataaaatttcttattccggtacactggcttttgaagacttatggcctaagttaggtgattacgatatgaatgacgtaatggtaaagtacaccagtacgatgacccgaaatgctcttgacaatcgcatttacgaaatagaagacaagtttatcttacagcactgtggcggttatctgcaaaacggatttggatatcaattacacaagctctcaaacagcaatgtcaagagtgtaaaaataacggggcctgatgccagtggtttatcaagttctatatacatggaaggaaaagaaacagagcctggacagtctcacccaaccatattgttgtatgacgacatgacaaaattcaaaaatatcactgatgaatcaaagaaagaatatactgtaaccatcacgcttgatggagctagtgagaaagaggtggtacctccttacaacccgtttatcttcatcagttccaacgagggtagaggcaaagaattacatctgataaattatcccccgactgacaaagccgacttatcgttactgggaaccggaaaagacatctacagaccagaagaagggatgtattatgtttctgcagacttgatgccgtttgctatcaatatgccagtaagtaatctcccggttccagaggaagggaaacgaatcgatcaatcatatcccaagttctctggatgggtatcatcgaatgggaaacaaaataaagattggtacaaataaagattgatacgatttaaataagagcagcccggatattgtacggaatcgctatcgggacttcgcattgcgaaccatcgatgaaaaagacataatagacatccgtttagaaaggcgcgaattacgcagttcacacaacttcttgaatactcaccaagaattcgtgtgaactgtgtttttattttaagccacaatattataggatataagtattatccgttatgaatgggctttcatcattaaatcttcggctcccattttatcttaaaacctttattagggaatagcatatcaaacacaatcacgaatataaaaacagatgttaccaagatattcatcgtcaataaagaaatgtgataaggccagggaagcagtaaagccaaagctattacagcaataatatgtgataaaggaagcatacggcacgtgacatatttatagatactatttgccagaatataaacgattggtccgataatcagaacaaaaacaacttccgctctcatttcttgttcgggatgggcaacaatcagttcgtctcctaccgcacaaataatcaatgctcccaccagtacgatatgaattgcattataaatcaaccccagctttccgggatctttcacttcctgtattttccgactaccggcttcactgctcacatcaaagtaaacccaccacatagccaaactaccaatgaaagatatgacagcagaaataatcacgagaggcgtccattcttctacttcactcaaagaagctcctgtcatcaatagagtttctccaaaagcaataatcacaaacaactggcaacgttccaccaaatgatgcccttcaatagtccattccttgctactgtccgaacgtcccagacgaggtaaagcaaatccgtgcatcggggctgtataatcacagatggcggctataatccacagtagaatttgccattctccctgcaatatggcacccgtaatccaaaagacggcagatatacagaaccagcccataattcgcttaaaattagcagccagatgatgatctcctaacaccccgataatataaagtgttctccctgcctgtatcagaacatagcagacagcaaatatcaatccccggtaagtaaaggcataaggaatagcagccgccatcaccagccccaccagcatactgataaaaagaagaatacgtatcggccgggtatccgggttgaaccagttagtcacccagatggtatgttgccacaacatccagactgcaaaccacaggattgtttctttcaataatccttcccaagtgagattatgaagcaaataatgtgaaagttgcgtgaccgagaaaacataaatcaggtcaaacagcagttcggaataagagacagtagcagtttccgtttctctcttccgaagcaatggatggggggagtaaaacatacgaggttccttttatatatataaaagaaaccccgcagaagtctattttgttcagagaaagtcttacattctggaaggaacttcgatacccagcaaattcattcccaagcgaacaactttagctacattagcagacagagcgatacggaatactttcactgcctcattctcttcgcgcagaatactatagtcatgatagaactgattgtattctttcaccaagtcataagtataattagcaataatagacgggctgtaatcttcaccggcttgttttacaacagcagcaaagtcggcaaccatctgaatcagcccttcttccttttcactcaattcaataccagccggaatctgttcagaaattacgatacctgattcggcagctttccgaagtacagactggatacgtgcataagtatattgaataaacggacctgtattaccattgaagtcgatagattctttcggattgaatgtcatattcttacgggcatcgactttcagaatgaaatatttcaatgctcccagacccacaatacgggcaatatcatcagcttcttcctgtgtcaaaccatccagtttgcctagttcttgtgaagtttctttagcagtggcaatcatttcctccatcaagtcgtcagcatcaactaccgtaccctcacgggatttcatcttaccttccggcagttccaccattccgtaagagaagtgtaccagactcttaccccattcgaaaccaagtttatcgagcaagatagaaagcacctggaagtgatagttctgttcgttacctactacataaatcatcttattaatcgggtaatcggcaaaacgaagtttagccgtaccgatatcctgagtcatgtagacagaagtaccgtcaccacggagaaggagcttatgatccagtccttcggcagtcaggtcggcccatacggaaccgtcttctttcttgtagaagaaacctttttccagaccttccattaccttttcttttccttcgaggtaagtattggattcataatagatcttgtcaaagccaacccccatcttcttgtaggtttcgtcgaatcctgcatatacccagttgttcatcatttcccacaatccgcgtacttccggatcaccggcttcccacttcaccaacatttcgcgggcttcctgcatcaatggagattcagcttcagcctttgctttcgcttcatcgtcactcattccctgcgctgtaaatttagccatcagctcctttacttccgctttataatgcttatcgaaagatacataataatcacctaccaggtggtcacccttcttacccgaagtttcaggagtttcaccgtttccgtatttcttccatgccagcatggacttacagatgtggataccacggtcgtttacaatatttgttttgactaccttattgccgtttgccgctacaatgttagccaatgcgttgcctaaaaggttattacgcacgtgtcccaagtgaagcggtttgtttgtattcggagaagaatactcaatcatcaccaatggagaagcgtcagtgacctgcattaagccgtactgttcatccgcctgaatctcgttcagcaattcaatccatgtagccgatgcaatagtcaggttcaagaacccttttatcacattaaacgctgctacagccggatcgtttgctttcagatattcaccgatttcctgtgctgtttgctccggtcctttttttgacatcttcagaaaagggaacacgaccagtgtcaaatgtccttcaaattctttctttgttttttgcatttgcaccatcttttcagggacttcctgaccgtagagtgctttcagtccactaataacggacgctacaagtttatcttctatcttcataatcaagttatttcttgcgcgcaaagatacaaaaaaaggagacgcatcgcgtctcctctcctaatttctttcaactatctatcttattcaacagctgcagataattcagcaccagctttaaatttagctactttcttagcaggaatagtaatagttgcctttgtagaagggttaataccagttctttcagctctttcgcttacagagaaagtaccaaaacctacgagagatactttgtcaccagctttcatagcattagtaactgaagtgatgaaagcatcaagtgctttttttgcatcggctttgctcatttgagcttcagcagccattgcactaataagatcagacttattcataatacgtaaaatgattaattaatatatttgttacacaaaagattatcccacaatggattgattccacaaatatagccgaacaaaacaacatatcaaataaaaacataaaaaaaacgcagcaaattattgaaaaagagctaataggaagcgtttttcatgctttaaaacagaatttattcgtacttttgcgtctattatctaaatattcagaaattaaaatgatgccaactgtaactaaaaacctgataattatcaatgtactagtatttttcgggacaatcgtagcccaacgttacggcctggatttaacgaattatctgggattacattttttccttgcaagtgactttaatccggcacagcttatcacttatatgtttatgcacggcggattcagccacattttctttaatatgtttgccgtttttatgttcggaccgattctcgaacaaacctggggacccaaacgtttcctcttttactatattctctgcggtatcggtgcgggacttatccaggaaggagtgcagtatattcaatatgtaacggagcttagccactacgcacaagtgaatataggtacaggtgttatcccaatggaagagtatctgaacatgatgaccaccgtaggtgcttcgggagccgtttacgccatattgctggcattcggtatgttatttcccaataaccggttgtttatcttcccgctgccatttcctatcaaagcgaagttcttcgttataggatacgccgcgattgaattatggtcaggacttgccaatagcgccggagacaatgtcgctcactttgctcatctgggaggaatgttatttggattgatcctgattttgtattggagaaaaaaaagcaataacaatgggacatattatagctgatttaaaggagacattcagaagaggaaatattttcatccaactgatttatatcaacgtaggcatctttctgatcggcacgttgattaacgttttcttgcgactgtttgaagtaagtacccccgatatattcggtatatttgccctgccggcatcctttatcggatttattcatcagccgtggtcgttatttacttatatgtttatgcatgccggtatcctgcatattttattcaatatgctctggctgtattggttcggaagtttgtttctctactttttctcggccaaacatttaagaggactatatgtattaggaggtatctgtggaggtttactgtatatggttgcctacaatgtatttcctttattcagttcgcaagtggcgggtgcaacattggtaggagcatcagcttccgtattagccatcgtagctgctacggcttatcgtgaaccaaattacagggtgcaactttttcttttcggtgctatccgtctcaaatatctggcactggttgttatcggaatcgatgtattatccatcacctcaagtaatgccggaggacatatcgcccacctgggcggtgctcttgcaggactttggtttgccgccagcctaagtaaaggaactgatttgacttcctggatcaactggattctggatggtttcacctccttgtttcaaaagaaaacatggaaacggaaaccgaaaatgaaggtacactatggaaacagtgccaccggtcgcgagaaggattatgattacaatgcccacaaaaaagcacagtctgatgaagtggaccgtattttggaaaaactaaagaaatccggttacgacagtctgacaactgaagaaaagaaaagcttgttcgacgcaagcaaaagataaaggaatggaacatattggcaaatttgtcgcatatctgatacttgctgtcaacgctctcttcgtgggaacgttgatattaagcgcttatagcccttaccttaacccgaaaataaatccacttgcttccagcttgggacttgcatttccgatattcctgacgattaatctgatttttatcggcttctgggcattcgtcaactaccgctatacgctcttgcccgccatcggttttctaatttgtattccgcagatacggacttatattccttttaactccaccacaaaaaacataccggaaggaagcatcaaaatcctatcctacaacgtaatgagtttcaacaatttggagaagaaagatggaaaaaacccggtattgtcttatcttgtagatagtaacgccgatattatctgtctgcaagaatataacaccgctaccaacaagaaatacctgacggaacaggacattaaaaaagcattgaaagcctatccttaccaatccgtccaccaacaagggaaaggagacgtgcaacttgcctgtttctctaagttccccatactctcgatacatcccatcgaatatgaaagtaattataacggctccatgaaatatgtactgaatgtgaataacgacactcttacattaatcaacaaccacctggaatccaacaagctcaccaaagaagacagagggatgtatgaggatatgattaaagacccgaatgccaagaaagtaaaaaccggacttaggcaattaataagaaaactggcggaagcatcggctatccgggctacacaagcagattctgtggctaaaaccattgcagaaagtaaatatccgacaaccatagtatgcggcgatttcaacgacggttctatctcatatacccatcgcatcctgactcaaaaactagatgatgcattcacacagtccggtaaaggattgggtatttcctacaatcagaacaagttctatttccgcatagacaatatcttgatcagccccaacctgaaagcctacaattgcacggtagaccggtctatcaaggcatcagaccattacccgatctggtgctatatcagtaaacgataagaactgaaaactctaataaaaaacacttatgatgattaaaaagacactaaccattttagcagtaagttgtatgatgtactcctgtgctacgaaaacagaaagcaatcctttctttacagagtttcaaaccgagtatggtgttccttctttcgacaagattaaattagagcactatgaacctgcctttctaaaaggtatagaagaacagaatcaaaatatcgaagccatcatcgaaagcccggaaattccgacattcgaaaatacgattgtggctttggataacagcgcacccatcttagaccgggtaagcatcattttcttcaatatgacagatgcggaaactactgattcgctgaccgcactttccatcaaactggcaccggttctttcggaacataatgacaatatctccctgaatgggaaactattcaaacgggtgaacgatgtctaccaaaagaaagattcattgaacctgacgtcggaacaagaacgtctgctggacaagacttataaaagatttatccgttccggagcgaaccttggcgaaaaggaccaaactcgcctccgcgaaatcaacaaggaactttctacactcggcattactttcagcaacaatatactgaatgagaataatgccttccaacttttcgttgacaaggaagaagatctggcaggattgcctgaatggttccgccaaagtgcggccgaagaagcgaaagcagccggacaaccgggaaaatggttgttcaccctgcacaatgccagccgtctgcctttcctgcaatattctgaaaatcgcccgctccgggagcaaatatacaaagcttatatcaaccgcggcaacaacaacgacgggaacgataacaaggaaaacatccgcaagatcgtttctctccgcctggaaaaagcgaacttattaggtttcgactgttatgcaaacttcgtcctggatgaaaccatggcaaagaacgccaacaacgtaatgagccttttaaataacctctggagctacgcactgccaaaagcaaaagcagaagctaccgaacttcagaaattaatggataaggaaggaaaaggagaaaaactggaagcatgggactggtggtattacaccgaaaaactgcggaaagaaaaatataatctgtctgaagaggatacaaaaccttatttcaaactggaaaatgtacgcaatggtgctttcgccgtagccaacaaattatatggcatcaccctaagcaaactggaaggcataccaacttatcaccctgatgtagaagtctttgaagtgaaagacgcagacggttcccagctcggtatcttctatgtagactatttcccacgtcccgggaaaagcggtggtgcatggatgagcaactatcgtgagcaacacggaacaacccgtccattggtatgcaacgtttgcagctttaccaagccggtaggcgacaccccctctttattgaccatggatgaagtggaaaccctgtttcacgaatttggtcacgccctgcacggactgctgacaaaatgcgaatacaaaggaacatcgggaaccaacgtggtacgcgactttgtagagcttccttctcaaatcaacgaacactgggcgactgaacccgaagtgctgaaaatgtatgccaaacattatcagacaggagaagtgatacccgacgaaatcatcgagaagatactgcaacagaaaactttcaaccagggcttcatgaccaccgaattactggccgccgccatcctcgacatgaacctgcacacgataacagatgtaaagaatctggatatgcttgcattcgaaaaagaagcgatggacaagcttaatttgattcccgaaatagcaccgcgttatcgcgtgacttactttaatcatatcattggcggatacgcagccggatactatagttacctatgggccaacgtattggacaatgatgctttcgaagctttcaaagaacatggtatttttgataaaaacaccgccgacctgttccgccataacgtattggagaagggagacagcgaagacccgatggtgctttataagaatttccgtggagcggaaccaagcctggaaccactactgaaaaacagaggaatgaaataattcagcaaaaaagcccttaaacatcaaatatttgagggcttattacacatgaatgtgaaaaaaaaactatatttgcagccttgtatgcggcaaaaagaacttgtgtacgacagaatttaactgaaaattaaattaaaaaagtaatcatcataaattaaaagtaaaatgcaaaacaaaggatttgtaaaggtttttgcggtattactcacactggtatgtgtgttctatctctccttctccttcgtaacacgccattataccaacaaggcgaaagaaattgcgaacggcgacccgaaagtggaacaagactacctcgactctctctccaatgagaaagtgtggttgggtaactggacgctgaaacaatgtcgtgagatggagattagtttaggtttggacctaaaaggtggtatgaacgttatccttgaagtttctgtacctgatgttatcaaagcactggctgacaacaagccggatgaagctttcaacaatgcattggcagaagctgcaaaacaggctgtaaacagccaggatgatatcatcacgctatttgtcagagaataccacaaagctgctcctaacgcaaaactttccgaactcttcgcaacacaacagttgaaagacaaagttaaccagaaatcatcggatgcagaagttgaaaaagtattgagagcagaagtaaaagctgctgttgaaaactcatataacgtacttcgtacacgtatcgaccgtttcggtgttgttcagccgaatatccagagcctggaagacaaaatgggtcgtatcatggtggaattgccgggtatcaaagagccggaacgtgtgagaaaacttctccaaggttctgctaacctggaattctgggaaacttatacagctaaagaagttcttcctgccatgcaatctgctgatgctaaattgcgcgctgtattagcgcaggagacaggtgcagactctactgctgtagattccaccaaagaagctccgcttgcagaagctactccggccaagaaaaacgtaagtgctgccgacagtcttgctgctgccctgaaaggagatgctacaactactgaagataattcaacagctaacctggcagaaattaaaaagcaataccctctgttggctatcctgcagttgaactctagcggacaaggtcctgtgatcggttacgctaactacaaagacactgctgatatcaacaaatatctggctatgccggaagttaaagcagaactcccgaaagaccttcgtttgaaatggggtgtttctccttctgaatttgacaagaaaggacagacgttcgaattatatgctatcaagtctaccgaacgcaacggtaaagctccgttggaaggtgatgtagtaacagacgcgaaagatgaattcgaccaatacagcaaaccggctgtcagcatgacaatgaactctgacggtgcacgtcgttgggcacagctgaccaaacagaacatcggtcgttctatcgctatcgttcttgacaactatgtatattctgcaccaaacgtaaactctgaaatcacaggtggacgttcacagattacaggtcatttcactcctgaacaggcaaaggacttagcaaacgtattgaaatcaggtaagatgccggctccggctcacatcgtacaggaagatatcgttggtccgtcattgggtcaggaatctatcaatgcaggtgtattctcattcgtagtggctctgattctgttgatgatctatatgtgtatgatgtacggcttcataccgggtatgattgccaatggtgcattgttcctgaacttcttcttcgtattaggtgtcctctcctccttccaggcagcattgacaatgtccggtattgccggtatggtgttgtcactaggtatggcagtggatgcgaacgtacttatctacgaacgtactaaagaagaacttcgtgccggtaaaggtgtgaagaaagcacttgctgacggttattccaacgcattctccgctatcttcgactcgaacctgacatccatcatcacaggtgtcattctgtttaacttcggtaccggtccgatccgtggttttgctacgacattgattatcggtattctagtatccttcttcaccgctgtgttcatgacccgtatagtttacgaacacttcatgaacaaggacaaactattgaaccttacattcacaacccctgtttcaagaaacttgatgaccaacacacgttttgattttatgggaacaaacaaaaaatcccttatcatcactgtagccatcatcctcgtttgtatcggttcatttgccatgcgcggtttaagccagagtatcgactttaccggtggacgtaacttcaaggtacagttcgagaatccggtagaacccgaacagattcgtgaattgatctccagcaagttcggtgatgctaacgttagtgttatcgctatcggtacagataagaaaactgtacgtatcagcaccaactaccgtattgaagatgcaggaaacgatgttgactctcaaatcgaagcatatttatatgagactttgaaacctgtgctgactcaaaacatcactctagctacctttatcgaccgtgacaatcacactggtggtagtattgtaagttctcaaaaagtgggtccgagtatcgcagacgatatcaaaacaggtgccatctattccgtagtactggctttgatcgctatcggtctgtatatcttaatccgtttccgtaacatcgcatatagtattggctctatcgtagctctatcatgcgataccatcatgattatcggtgcttactcattgttatggggtatcgttccattctcactggaaattgaccaaacgtttatcggtgctatcctgacagctatcggttactctatcaatgacaaggtggtaatcttcgaccgtgtacgtgagttcttcggcctgtatccgaaacgtgacaaacgtcagttgttcaatgattcattgaatactacacttgcacgtactatcaatacatcattaagtacattgatcgtattgctgtgtatcttcatccttggcggtgattcaatccgcagctttgcattcgcaatgatcttgggtgttgttatcggtacattgtcatcactgttcattgcatctccgattgcatacaacatgatgaagaacaaaaaagtcgtaccagtaactacggaagaataataaattccagaaatagaaaaagcctcttccgaacattcggtagaggctttttctattgattattaaaacaaatagaagctataagacgttcatcttaaaagaagccattgttaaacttaaaaccagatacgatatgaaagcaaaacaaaacaacttctcacagattcttcgtagtagcctcgaggggaatcgaacccctatctaaagtttaggaaacttctattctatccgttgaactacaaggccgcttcaaatttgcttgcaaagataacggtttctgtcgatttaacaagaataaaaatacaggttcctttcagatatttcaaatatttggcgtcaataggacaataaagttcgatttattttgataattcgattaactttccgacctttgtgctcacaaattgaaagtaaaatcagtttttaaattaaatatagtaattaaagttatggcagacgaaatgatggttaaagaattggaggaagtagtagtacgtttctccggcgactccggcgacggtatgcagctggccggcaacatcttctcgaacgtgtcggctacggtaggaaatgacatctgtacattccctgactatccggcagacatccgcgccccgcaaggttcactgaccggtgtttccggttttcaggtccacatcggtgccggacaggtttacactcccggagaccgttgccacgtgttggtggctatgaatccttccgcactgaaaacacaaatcaaattctgtaaaccgcaaggacttatcattaccgactccgactcattcgaagccagagatttggaaaaggcacgattcaagaccgacaatccttttgaagaattaggcataaaacaggaagtacttgaagttcccatctcttccatgtgcaaagagagcctgaaagactccggactagacaataaatcagcactccgttgtaagaacatgttcgcactcggactggtttgctggctgttcaaccgtaaccttgccgctgctgaaaaaatgctgcgtgagaaattcgccaagaagcccgaaattgcagaagctaatattaaggtattaaacgatggtttcaactatggtgccaacacacatgcttctgtctctacttataagattgaaagtaaagctccgaaatcaaaaggactttatacagatatcaacggaaataaagcaactgcttatggcttgattgctgctgccgagaaagcaggtctggaactctacttgggttcttatcctatcactccggccactgatattctgcacgaattagctaaacataaatcactgggagtaaaaaccgtacagtgcgaagatgaaatcgcgggttgtgcttctgccgttggtgccgcttttgccggtgctttggctgtaacgactacttccgggcccggtgtttgtttgaagagtgaggccatgaaccttgctgtaattggcgaacttccattagtgattgtaaatgtgcaacgtggcggtccgtcaacaggtttgcctactaaatcagaacagacagacttattgcaagctctttacggacgtaatggtgaaagcccgatgccggtgattgccgcaacttcaccaacgaactgttttgatgccgcatacatggcatgtaagattgctctggaacacatgactccggttgtattactgacggatgctttcgtagccaacggctcggcagcttggaaacttcctaacttaaatgaatatcctgccatcaatcctccatacgtgactccggacatggctggtaactggactccataccaacgcaatgaagaaaccggtgcacgttactgggcaattccgggaactgaaggattcatgcaccgcatcggtggtcttgaaaagagcaatgaaacaggtgcgatctctaccgaaccagaaaaccataataagatggttcatctccgccaaactaaagtagataaaattgcagactatatccccgaactcgaagtactgggtgatgaagatgcagatttactgattgttggctggggcggcacgtatgggcatctccgtctggctatggactttatgcgcgatcatggaaagaaagtggctttcgcacacttccagtacatcaacccgctgccgaagaatacagccgatgtattgcgtaaatacaagaagatcgtagtagctgaacagaatttgggacaattcgcaggttatttacggatgaagatacccggattgaacatcagccagttcaaccaagtgaaaggacagcctttcgttacgagagaattgatagatgcattcactaaattattggaggaataaaagatgagcgataaagtatataccgtacaagattataaatcaggccaacctcgctggtgtccgggatgcggtgaccacgctttcctgaactcactgcacaaagctatggccgaactgggagtagctccgcacaatattgccgtcatttccggtatcggttgttcttcccgcctgccttactacgtaaatacgtatgggttccacactattcacggacgtgccgctgctgttgcaacaggagcaaaagtagccaatccaaatttgactatctggcagatttccggtgacggtgacggtttggcaatcggtggtaatcacttcatccatgccgttcgccgcaacattgacttgaacatgattctgttgaacaaccgtatctatggtttgacaaagggacaatattcaccgacttcagaacgcggattcgtcagcaaatcatctccttacggaacagtggaagacccgttccatccggcagagctggctttcggtgcccgcggacgtttcttcgcacgttgtattgcagtagatggtgccgcttccgtagaagtgttgaaagcagcagccaaccataaaggtgcttctgttgtagaagttctgcaaaactgcgtgatcttcaacgacggaactcacgccagtgttgctaccaaagaaggacgcgctaagaacgctatctacctggaacatggcaaaccgatgttatttggtgaaaataaggaattcggattgatgcaggaaggcttcgggctgaaagtagtgaaacttggtgagaacggtgtcacagaaaaagatatccttatccacgacgcacactgccaggacaatacgcttcaattgaaactggctttgatggaaggtcctgacttcccgattgcactcggtgtaatccgtgatgtagatgctccaacttacaatgatgctgtcgctgaacaaatcgaagaaatcaaaggcaagaaaaaatatcataattttcaggagctgctaatgactaatgatacttgggaagtgaagtaattcactgctcatcaataatataagagctggaggaaggataaaacatcactttctccagctttcattataaatacacctcaagtttgtttaaaagtcattttcaatcatcccacagcatactgggcgtcaccccacaagccgtggtttgtttcatgccatgaaaccatttgtttctcaccgagaaacgaaatgtttcaaacagggaaactattagtttcaaaggttgaaacaaagtgtttccctataagaaagcatacttttgttaaaatctagtgtataaccaccttctatacaaaggttacgacattaaggttggctattacggagataaggaaattgattttatcggagagaagaatggagaaaaactatatatacaggtcgctttaaaaatagatggcgacacagcagaaagagaatttggaaacttactaaagatacaggacaactatcccaaaatagtgttaacagaagatacattcagcggaaacagctacgagggtatacgccattgtcctatacgccagttcttaatggagtaaaccatacaatatacgaaaaataaatgcagtacaccatcgggttgccacgagcaatcaaatcgcctttggtgtgctgcatttacatttgaatcaagtcatctataataccgtggattctgctgcaagacgggcggcaatgtccattgttagttagtaatagacagatcggttaccttatacggatgctttactgctgcatgggcagctttctgggcaacagcttttcgtgcctcatccagcccttccggggcataaggattcccgattacattgtgtttgaagatgcgttcgaaccaggtacaagcagcggtataacgtccaatcttcacatccagatgatagccgtcccgattcagatggtcgccgatgaaagaggtacgcgcattttgtatggcagtgcccgaagggatgacaatctttatcttattcaccttagccgctttcttcacagcatcggcaattgcctgatacatgatcagttgattgcagttgtagtttttaaatccactatgcttggaagtagatgcatacgcccaggtttggtgcagcatcagctttgttttctttggaaggcgtgcttttacatattctatgagctcgggaagagaagcttcatacgtctcatacattcccgaaaaaggacttgcctgttgcaggctgacgtaatcccagtcttcatctgcaagcaccgtttccaaagacatcttacccttttcccgtttttttccatctgtaccgattttccggtaggcataggcaggagcattgtcacgggcatttttcacatgacgttccagggaacagccgccaataaacatattgccgattatggttgaaatgccttcggcttcggcaagttcatgcagatattgctccacggcatcttgggagaagctgttgccgatggcaagtatcctgaccgttttttgctgcgcatacactcctccggcaagaaggagcagtatgcacatacaaatcactacaatcttatattgcttcatcacattcaaatataactaaacttatcggttatttctctttttcatgtaataatctctcatcagataccacgctttcttacgcataccttggtcggatatgagccctttgcggttccagccatcctgattggtggggtggaaacggaatggggaacggaagtcgaacagaatccagggagatacgccacgcaggttcgggatattgtcgaacatacggatattatccctatacagacgtgcctggtattcctcactccaagaactgactacattctcatcaccggactgaccgtacaatgcttcgccgccaaattccgagataatcaacggtttgtccgtcactacttcccatatagcgtctttcggttccacaggccacggatgataccagcccatatatttattgatagctacgacgtccagttgggaagtaaaagaatcttccattacaaaacgctgtttttcgctattgaagtgcacaaggtcgaaagcggcaacatacaggcgggtagtgtccagttgctttcccgtttcgagcagggaagtaaggaattcattccgttctttggaaggctgtgtttcattggcgacaccccaataacctaccgcgcagcggttctgatcacgcttaatcatttcagaaagcatcctctgcgctttcttacgggtatcattgtctgtaaagtcaatgccttgccaaatgggaatctcctgccagagaaggaagcccatcttttccgccaggcgtaccgtgtactcattctgcggataatgagccaggcgaatcatgttcacgccaagcgctttcgcttcattcagcaacatggccgcatcggcttccgagaaagcacgtcccatacgttgcgggatttcttcgtgaaaagagatacagcacataaatgtcggcttcccgttcaggtaaatatcagttcctttcacggtgatattgcggaagccgatttgctcttccacacggtcggcacttgaagatacagtcacgccatagagtttcggttcttccggcgaccagcgttgcagcctcttcgcattcaatacggtttccgcccttccttctgcgtcggtggtgagctccgcgttgattttgagttcggggatggcaactgttactttctcaccagcctttttatcagaaagatgcacgcgcgcgatgatgcggtctggagtgtttttatccaattggatgaaataatcttttataaatgtccggggagttttcaccagcaatacatctcttgtgatgccgccatagttccaccagtcgaatgccatagcgggaatggcgtctttggtacggcggttgttcacttctaccgccaggaagttgtcaccgtttttcaacaggtctgtcacttccacttggaaaggagtaaaaccgccttcgtgctctgctatctcttttccgttcaggtagactttgctacgatagctgacagcaccgaaataaaggaactggcgtttgtctgccaagcgtttggcatcaaagtgacgggcataccatacagtgccttcgtaatacttcaattcgggtgattgagagttccagtctcccggaacattaagacgcaacccgccttcaaacgcatattcgtagaaatcaatatttccttccggttgccggttttcatagattttcatccgttgtccctggtcgtacaggtcgatgatggcattccatttaccattcagcgaatggatgttgcgaccatatacattcgttatcagctcctgtgccgcaacgcttccggcaaaagcgattagcaacaatagacatagacttaatttctcacctgttttcatttaagtatgttgttataattagtgtatataataagttcaggcacggattacacggcttttagaatagaataggtaaaacaacagtgttaatccgtgtaatccgtgcctatttcgatttattttttaggaaattcattacccagttccaggctgcgctccactgttcggcataggcatagtgagcggtcgtttcagctacaaacagttcttttggagcattaatcacgttataagtggagtaagtggtggtaggcggacaaactctgtcattatatccgaaggtataaaatcccggcactttaacctgacgggcaaagttgactacatcaaaatactgaatggttttcatcttttccggtgtccggttcttctcatccttaaacagatgcggccaaccgcctgcacgaccgtgggcataacccgccatatcacacaaagcaggatagaaagaaaccaatcccttgacacgagcatccagtccggcaattacaatggaaagcgcaccgccctggcttcctccaaaagtcgccagattaccgttaaattcgggaagtgtgtaaatgaaatcaatggctctcacacagcctgtataaacccgtttgtaatagtacttgtcccgattgtccatattgaacgagtggtaattcttcaaagcaccgttataaagccggtgatacacatccccctccatattgaccggaatgccgtgaataccgatttccaatatgatgaacccctttccggcacgttcagcttctccgttataggcacggatgcctgcgcccggcactttcagaatcgccggatattccccggaagccttcggaacacaaaggatgccgtacatacgggacacatagtcattgttcgcaaaggagacatgatatacgttcaccttatccgtgcacctttccggcagtaaagtcattatcggttccagtgcccacttttcagcggcttctttggtacttttccaaaattccagaaagtcgacgggcaacggagtggtcggttgcaatttttcaggagaaaagccgacggtagccacgccttcatactcacgcccttggcaagtgacaaaagcacggcaacgcaggaacccttcttttttcatagtccctgcgttaatttcaagcttttcattcttcaaaggctgtttgcctgtctgatgaggtttcatcatgtcttccgaaatctcataacgtacttccagattatcctgtgggatattgcatttcaataccactactttgaatttcactttttctcccggtttatacagccaattggtgtggtctggagtgacctgcacttgaaccagtctttcctgcggctgtccccatgcaactatctgcatggagacaaatgctatcaggagaagaagaaaacgtacactttttaccatagttccctattttatttcatttgtcgttgttatattaatatcccatttatcagctattaatactcattgtctcaaactattaatacccattgtctcaactattaatacctatccgctcagctattaatacctgacaactcaactattaacatccaacagcagaggtattaatgcttctctccacctaccatactactctgtaaatcagaagttaacacatcactcgtcattagcgtagaatgcagatagccgcctttttatggttttacttcgtattgatagagtgcgaaagagttcttatcatttagctcgaaacttactctaccctgtgcgccgacttttgcggcaaacttcttgccacttcccatcacagggataaaatccactttcttgccttcaggaagccaggtgtcaatagtccccctggcttgctcgttgtcttcacggtaaacaacaagataaccttgcgtgccggagacggtcgattggaatccggtccacgagcgtcccgagggttcttcaccaataggcagtatgacgccttgatgaaaccggagttgcaagggttggtatttcttgagcagagatgccgtaatataagcctcttcgggcaagttcgaagcctccatccaagccaacggctgtgccgccaaggtgatagcaaagaggtaatcgaaactgtaacgggcgggggcaaaaggatcggcagcgtcatacttgtcggcattacgccatttattaagaaactctatctgcatcttctccgccggtacatagcgagacagcatccagaggttgcgcaaggtgcgataagggtaatagttgccccaatcggtatagcggttttccaggaagatgttgccgtactcgttcatatagtgatacccgccgcgacgaccggcagtggcatcgaggttgaaaatcacttcatagttggtttgctccaacacggtatcaaacagtcggcgcagattctgttcggctgtcttggtaggtatctgcaggccgtctatcttgaaacagcagatgccgtacttcttataaagtccgataatggcttgcgcatctttttgccaatcggcaaaatcattctgtatgctggggttgaaccataatccgatgcgaatacccaatttcttgcctttctctacaataggtttcagaccatgagggaatttcgtggggttgggcgtccagtaaccggtattcttccaaatatccttaaaactacctccggcagtcttcgagttagggctttttccgctctgccagccatcgtccagttgaaagagggtgatgcccatgcgtgcggcacggtccagttctgccaggcagaaagcctcatctattttggcatcctggctacggtcgccccaggtattgagcataatcatctcatcctgtgcggcggtatgatggcgcagttgtttctgatagaggcgcaaggcagtaagcgcttcttgctcgccgccggtatagatgccggtaacgcatccataaacgcgggtccagctatccggctttacatcatgagacgcaatacccagccccactatcataaaatcgctaaagtccgccacgaagtcagaacccggataatgtaattgggtactgctgctaggagcctctttcaaaaaaaagaagccttgacgcgtaactacgtcatgagcaaaaagcaaattaccacgatacgtattgcgacggtaaggaagccaggtacgcccggtcaccagattgtcgttccaatcggtgtagtcgaaaaactctattgtgcgggcactccaatgattgccggatagttgcagcctgtcgagcgtgggagttttcacccccgtagccatatcggccgtgtgctctatatttttgcggtcagcgttagagcggttatcctccttattctgataaagttccacttgccctttcagataggtgtcgcaagcaatggcgggacagtctgcataaatgcgatagcgacgctctatattcagcgaaccgatagtgcaagccacggtagcctgcagataactggcgtggatgccgttcgtcggtatctcgttcacggtaagcgtggcatccgtagggatacctttcacaatcgagaaatcgggttgtttgccctgtgccggaatggtttttccgtgttgcttgtcagtaaggctgatggtaacaggcgcaccgttattccacagcatgacgcgttccatatagttattgcccatacgtagcgtgtcacctttcagaaaagcgtaatactgttgtcccccccaaagcggcaaggtacatattgccgatagaaatatcgtgataatattttttttgctcatagtttgtctacggtttgatgtaagctcccggaacttccaacaatttgttgggttcgttgaagcgttggttatcgggcacatcgcgtttgcccagacccgcttgcataagttgcttcagttccggcaggtgatgatgatagatgtcgcgcggctctacactatgcttgtggcagagtccggctgccatacctactacttcacccatcatgccggtagtacgcatcacacgtaccgtacccaaagctacatgggtgcagctcatattgcgacctgccataaaaaggttgtccacattgcgagaatagaggcagcgatagggaacggcataaggataaatccaacgatgcaccgtagccgacttgaattcattgccgggaaagcggacactgttcacgctgtcggggaagtgaaggtcgatgctccaagttgtggtaaccgaagcatcctcgtgcgccacattcttatcaatatcgtcctgtgacagtacgtagtcgcccaagagacggcgtgattcgcgtttgcctgaaacatacgccacccagtcgagggaacggttggcatacttcttatggtctttatagtgattcttcagatagctccagttggaatatatcaccaaaagtccatagtcgcgtacacgttcagcttcgctgacttgattgcggttcatacccgtttcccatttccactcgcccatagttacaggctcacagttttcagcgtcaaagcgcacgccatattcaaaatgagggaatgaggttttcttcttcatatccttactataccattgtatagaagcccccatcaccaatgagtcgggttgctcgggagcaaggctctcgccatattcatcgcgaccttcacgccccatagcccaatcggcaccggctaaatagcctatggtagcatcacctgtgcagtcgctaaagagaggagcggtaagttcggtttgttcgcctgtctcgatgtgctggatagtgactgacgcaatgcggtctccttgcatcttcacggctaccgcacgttgagaagcataaagggtaatgttcttttcggcctctataaagtcttccttcttctggtcttcatagtagtcgcccggttgggcattgccggagcgttcatgaccgaactcacgtatcatacgccccaatccctggttaggttccatttcgatgataccgccgaggtgtacacgaatctccgacgagttattgccgcccaatacaggacggtcgttcactagtgctaccttacaacctaaccgggcagcagatgcggcagcacacattccggctactccccctcctactaccacaaagtcgtattgatgagcgggcaccgtctgttgttgtcgcaagcgggtacgaagtgcggctgtctctgccgcatcccaggtagcaggctgcgtgttcgcatcggtcgtaaggtaaatggcatcgcaacgaccatcgaaaccggtgagatctttcagggcaagggtggtagtccctgctttcaatactgtctttccggcaaattgccattgccaggaattaccggtatgtcctaatgtagctttcagcaatttgccgcctaaagccaggcggaactttccggggccctcggcatcggtccaaggtgaagtccagttgtaagtacgggcatatacgtagtaagtacccgcctggggaatgttgatttctgccgtagcatccaccacagggatgcccatgccatgtgccatgagatagggcgaacccatttgatccatgaactgctggtcgagcacccagccgcctcgctggctgaagctttctgcttcgatgagcagttcttcggctacagccacaaggctacaggctacggctatgcatgtcaataagaattttttcatcacagtacagcgtttttatgattattgtctactatcttcacagagggaacagattatctcgccattttgtaaatttcattgcctgccatcaaaaaagcaccaactccataaacttccgtcatgtcacgagtcactttcttcgggtcggcaccgatttgctgcacataacccagtttcccattcggttccacagccgagactaatgcattccagccttttatcattacaggaagataaatttccttatccaataaaccttcgtttattccataagcaatggaatagacaatgaaagtagtgcaacttgtttccggtgatggataagaggcaggatccaaaagactggcatgccagaaaccgtccggatgctgtaatccggcaacacgggtagccagttttacaaataattcctcatagaatttgcggttcttatctttcttgggcagttcctttaatatttcaaccagaccaccaagcacccaaccgttgccacgtccccaaaagactttcttgccattggcttcacgcttatcaaaataacgccagtcacggtagaacaagttttcttctttatcgaacaggtaatcataagtcgctttatactcacgattcataaatttgatatattttttctccccggtcagcatatacagtttggcatatacagggggagccataaagagagcgtcacaccaagtccaacgttccaaggtctttaagtctccctccaccagcttgaaactgccttcggacggatgattgacaatccattccgtacgggcgagcgtagggataatcattgcttcgtctttgtacttgcggtataaatccaaaaaggactgtgacacagcgatgtcatcagcatggtaaaaccgtttatccggctgccagcaattccgtcggcctatacgggtaagccacttataatatgtatcatcattgtcttctttttcagccaattccgcccaatccaccatgccgacataaagagcaccttgcggccagttcaagtcgtcatgttcaagagcggggtgtggattggcaatctgccaatccgccacctttcgcatgatagactttatttctgctttttgaaaaggaatctctgttgccattataaaaacggaacataacagagacgctcccaataaaagtgtttttttcattatatatttatttgtttatcattcggtcattacagttcaaccatagcctttaaaggcaattgactggaagcaggaccgactaagatctcaaagtctcctttttccactacaaagcggtgttgattcatatcgtaaaaagagaatgcatcctcatccagcacaacagaaacccgcttcttctcccctttcttcaagaataccttttcatatcctttcagttctttcaacggacggggaacagaagactgtacatcatgcacatacacttgtgccacctccgaagcatccatcttacctgtattctctatatcaaagctaacggtaacctgatgctcacccgttttctccgcagccatattactataagcgaaagtagtataggacaaaccgtagccaaacggatagaaaggttcttttcccgaacggtcgtatccacgataaccgacaaagacaccttcggaatagtctacacgcttaatctccgcctttaagttctcgtaataactgccgtgcactggattatcttcccatttccgctcgatagaaatcggtagctttccgcttggagaaatcttaccggtcaggatttcagcaattgcctgaccgccttcctgccccggataccaggccataagaatcgcttttgcagcatcataccagttggtgaaatccacaccgccaccggcgttcagtacaaccacaacattgggatgcatagacgcaatcttcttgataaacaattcctgatagcgaagcaaggcaaacggacggtcaaagccttcgccttcggtattactattgaaacctgtgcagaacacaacattatccacctttgccaatccttgacgaagtttcgcctcattaaggctataagcattaaaacgaatgatggccgaagaaatattatcaaagaattcaatccggaaacggtactccttacccccctcaaccggcagttcaacttcacggctagagtaggaatgatttccccaatctcctgtaatatgcttgtcattcacaaacagacgataaccgtcatcaccaccgatatgaagtttcaactgcccgtcagtttgtggcatgtagcaggctgtccaacggacagagaatccatctgtcggaaagccgtccaaaggtgctccatatccccagtcataatcaacagaggattccgtgcgtattacttcaggctggcccgaaagggtcttgtttttaaagtattcagctttgaagcctttcatctgacgattagcatcagtataaaactcatggacaatatcttcataaatcacatcatccgtcaatagtaacagattctttttcttcaattctttcaagccttgagccactgagacggtagaaaaaggagtgacaaaaccactgccgccaccggtaggaatcaaatttgcattaggccccatcacggctgtctttcctttcagcgggagcaagtttccttcattcttcaacaggactacaccctcgcgcgccagttctaaagctgtctggcgggagaaaggattatcctctgcgatgttgctgtctttctgttccttatccagcataccataagcaatcaaagtttgcaggatgtgttgtactttcaggttgatggtttcttctgtcactgtgccggctttgatagcaggcaacagattctccaaattcataaaacgtcctttcggcatttcgaggtcaagtccggcgttagcagcgcctacggcggaatatacagaagtccagtccgacatcagaatacctttgaagccccaaagattgcgcaagacatcaatattcaaccatttatgttcggtggcatgaacaccgttcaagagattgtagctgttcattacggcgccgacattagcttcctgtactgctttccggaaagccgggaaatagatttcctgcaaagtacgctcgtctatgtcagagctggcatggtggcggctccattcctggttgttggcagcaaagtgtttgattgtagcaatgactccttccgattgtactcccaggatatattgtttcgccgtttcacctgtcaagtaagggtcttcaccgaagtattcaaagttacggccgcacaatggagcacgatagatattcacgcccggaccaagcagaatattaactcctcttgccttggcatcctgtcccaagccttgccctaacttataaagtaattcccggttccaagtagaagcggaaagtattccggaaggatataaagtgctcttgggagcatgattacgaattccctgcggcccgtcagccaacttgatttcaggtattcccaaacgggggatggcacgcagagaaaaactggtatatccggagatatactctattttctcttgcaaagtcatttttgttacaatgtccttcgcacgttgttcggcttggggagtgattgtctgtgcatgggctgtgatacctaccataaataaaaacacacctacgcttcgtattaattttctcattatcgaattttactctgttaagtctatctttactttctggtcttttacctggatgtaatactctccgatttccaagaatcgtttgccgttcccgtcaacaaaaccaaaatcgcgttccaagtcaacatcaaaacggaatactttcgtttcaccagccttgattaattgcttctcaaagtgtttcaactctttcaccggacgggtaatagaacaataagggtcggagataaaccaatgtaccgtttccaagccatcacgttttcctgtattcgaaacagatacttctactgaaagttttccaccacgtttgactgttgttacagaaggagtaacagtgccatatttgaattctgtatagctcagtccgtgcccgaacgagtataagggctcactcgtgatgtccttatagaagccctgatgtccacgtccactcttgcgacgattataataaataggaatctgcccggttgaataagggaaagtcatagccagtttaccggaagggttgatacgtccagacaatattccagccattggaagcgcaccattcacacccggctgccaaatttccaatatagcatccgaaatcggttccaaccggttcaattccaacgggcgtccgttcaccaataccagtacgataggtttgccggctttcttcagttcttttgccagttcctcctgaatttgaggcaatgcaatagaggaacgagaagcattctcaccactccaagtcatcatttcgcccaaacaaagaacaacgacatcagaccaacgggctgcttccaatgcttcttcaaaaccttttcgattatccccttgtgtgctacaacctaacgcataacgcagttcagcttttcccacaaactcggttgccaatccgttatagagcattgctacatccgtatctttcccatgcccacaccaggaacctaacaagtcccaaccattttttgccatggggcctactacggcaatcttcttcttatctgtcagaggcagtatcccgttctcgtttttcaacaataccatcgactctgctgcaagctgggctgcgatatccatactctgcggacggaagaaacgttcttcctcatttgtaaccggggtataagggcgttcaaacaagcccaaacgaaatttcacccgcaaaacacgacgaactgattcatcaacctgcgccatcgttatctttccctcttcgacaagctctttcatataacggtcgtaagcatgagacatcatatccatctcaagccctgcattaaaagcatacactgcagcttcttttttgttagctgccaatccctgatttttcaattgttcgattgccccccaatcggaaactataaatccatcatgcccccaacgttctttcaatatttccgtcatcgtatagtgattggccgatccgggaactccgctgatatcattaaaagagctcatcagggtggccgcccccgctttcacacccatttcataaggcagtagataggtatcccaaagagtttgagcagagatttcagtataaacataatcacgtccggcttcggaagcgccataaccgatataatgtttcagacaagccgctattcggtcttcggccgacatatcatctccttgataaccacgcaccgaagcggcggcaaacactccattagcatatggatcttcaccatatccttcggctacacgtccccaacgagggtcacgcgccacatcaatcatcggcgagaacgtccagtccactcccgacatacgggcttcctgtgcagtaacggcacatactttttccaccagttcaggattccatgaacaagcctgtcccaaggaaataggatatacagtacgaaatccgtgaatggcatcgtaaccaaaaacaataggaatacccaagcgggattcttccatagccttcttttgcacattattacgcaaagccggattcgtatcgtaataaatcaacgaaccaatttccgccggcactttcttaacctcttctcctatattattcacattgttattccgccccatggtatattggtttagttgcagaattttctcttccaaagtcatgcgtgacaacaaatcatcaacccgtttttcaatcggtgctttggcatccttatacaaaggaatactttttttatcttttgccgaaagggcacatgttacttccaacaggcataaaccgaaaattaatacttttcttttcattgtgttttcgtcggttagttattatttaatcaatcaaatatagctttttcagacagacgtactgtctatcattgtttttcatgcaaagctctgctaattatcttttttcagatgtttatcagcaaactgtacatactgcgtccagtcatacaaattaatgtcatgttgccccgaacggatatgataaccaatggtcccggacaactcaggctcgttgacagccggcatctccttcaccggtaatcccggcagaccgaacaattcataaacaggagaggcataaagtccggaaaggaactctcctctaggatcggcccaacagtcttcttccgcgctagcgatataaacaggacgaggagctatcagagctataagttcatgctgatcaacaggcaggttttcttccttatcgttatattgccagaaattccgacagaaccaatgtgtaaattgccgatttacagcccgcacggtttctccgacttttcttctcgataacgctgcaccaccacaacctgaatcatttgagatgaccaatgcaaaacgcgggtctatcgctccggcccataaagtagtttttccaaggcgcgaatgtccgaaaattgctacacgttttgcgtcaatgtctttgtctgtctcaaaatagtccattacacagctcattccccatgcccaagcagccaaagttccccattcatcgtcagccggtcgtttttgccctttcttataaaataacggatgaaccccattacggaatgcatcatcaaagtccggatcaatatctccacgataaaaggtagccagcccataaccatgtttcatcagcatttctaccggccatctggaagcagcattaccacgtggaaacatgtattttctgccataagtcagtaatttttcttccgacggcaaagtaatgccttcatccgggtgaatggcatgattacccttaaagtttattccgaagaacatgggtaccgctccttgccgttggttaggcagatagataagtactgtcatataatgcttttcatcttttgtgagataaacagccacttcccgccgggtagccaagccattcaatgcgtttttgtcttcggtcagcacccggaaatgtaaatccttcggatgtgccggagctttgccatacatctgcgtttcgaaaagatgaatcaattcgggacgacgtttcttcacccattcttttatggtaaccactttttgcccgttgtttagggtcaatacgtcaggaagtgtataagccggaactttgctttcatcataattgactttcgcggcaggttcttttaattcagttaattccgtaatccggtccggatgcaacactgctccatgggcggctttttgagccacttcccgctgatcataattcataccttccggataatacgggtttcctacgacattgcgctcgaatattttctcaaaccatgtacaagcggccgtataacgtccgattttcaaatcgagatgataaccgtcacgattcatgtggtcaccgacaaatgaagtacgggcattctgaatagctgtacccgtagggattatcatttttatttttgttagtttcgatgccttatctactgcttttacaatagaatgatacatcgttagctgatcccgcccataattcttaaatccggtatttgttgcatttgcagcatatgcccatgtctgatgcaacatcaattccgttttcttaggaagacgtactttcacatattccaccaattccggcaacgatgtctcataagtctcatacatgcctgagaaaggactagcttgctgaaggctgacataatcccactcttcatccgctagtactgttcccaacgccatttttttcttttctatcttcttaccgtccagactgatcttccgataggcataagcggaatcattactacgagcattctttacatgacgttccaaagaacaacctgctatatacatattgccaataatcacaggaataccttccgcatttgccagctcatacaaatactgttccaccgcatcttgtgagaagctattcccaatagccaatattttaatagccttttgctgcgcacatgctccactcgcaagaaatgatagcaacaaaagcagaattacaatcagaactttattttgtttcatttttatctgaatatagaagagaatgagacccaattactgcacctgctttatagacaacgcatttaaatgtccctctgtcgcagctccgctcaaaccgacaacctcaataacaactttaccgtcagcagttggctctacattttcaaacttagtgatatattctccataaggaacttcttcaaaagttgcatactctccctcattagtacctaacttcaaacctgtcctaatctctttcggaccgatagtattttttcctttcagcgtatattcagatgtacgggccgccttgctaccaccaaagcgaacagccaatatcgtgaaattatatttacttgcagaactcaagcctgttacttcaactgttgccggttcagtatttccggcgttagcaacgccacttacaataagcccgtctttccatgccgacatcggaaattccacttcatccacaaccattactttatccggttctccagatactccattatagacagaagtaaatccgccagctactctcacacttacattcgtagcattagcctttgcatcggacaataacaatggagcagcacttacgcaagaagtataattattccatggagtagcggacgttatagtcgaactaccaaaatcaacataaataggaacagccaataggtccgaatcgacacgtttcttcaaatcaactaactccgtcacggtattcgggctctgtacagccatatgagctgctgtttgagcaacctttatagttttctcatccaaccctttcggggcatatgtattacctaccacattctttcccgtaatcttctcaaaccagacacaagcagcagtatagcgcccgtaagttgtttccaaatgatagtatcgcgtggcgtcaccattgtcaagacgagtgaaattgtcgccgataaaggaagtacgtccattctgaatagcagttccagcaggaataattatactgatattctggtcggacgctgcttcatttactgcattgacaatagcactgtacattgtcatctgatcattatcatagtttttaaaatcagtatgatttgaataagacgcataagcccacgtctgatgtaacatcagtttcatatatttgttagtggcacacccttttacataattaaccaaattactcaaataaggcttgtatgtatcatattgtccggatttgccactcacttgctgaagactgatataatcccatttgtcatctttcaaggctgtttccagtgtagtattcgccttagtagtcttgctcccgttctcaattttgcgataactatattttgcctgattaccgttagcattggcccaatgagtttccaaagagcatcctccgatgtacatattaccgataatagcttcaatgccttccgctttcaacaattcatacagatattgctcgactgcatcctgcgaaaaactgttgccaattgccaaaatacgaagcggagattgtttgaccgttacagatattactttagaaagccgtttagtctctcctggagattccactttgatgaaagcctttcctgctttcacaccttcaacctttacattggtaccattgtcctctatgattttcagtatttccggatcggaagatgtccatatatattccaggttttcagcttccgtactgctaaaaattggattaatagccatttcatcaccagtctccaagctaacaacatcttccacaatcatccaatgatcacccttgataggattgtccacgtcatcgtcagaacaagatataaacgcattacctataaacagaaatatcaggaacatgcaagatttccatgctatgtcactttttaaaaatacatttttcataatacagaagttttagtagtcatacattttcttataatgaataaaaaggatatatagaattaccccgctcctccaataaggagcggaacaacatacttcatgtagatatttataacaggaaaactgttatttaaccgttatatccattagcttcacccaaccggagtctaacaggttatttttaactgccatccgcagccctattgtattatctttagtggtatccacaagacctaccgcccacttataagcacccacggaaactcctttcagtgtcaaatcaaaattataagtagtcggtttattcttcaaccacgtagataaatctgtctgggtatcaacaaacaccttttttacttcgttcttatcgtccaacaaagcaaatgctactttatagcgttgattccattgcggaatattagtgggacaatatccccatcccatattattccaacgatgaacgatcgttattttctcgccactcttaacatctttaggcaatgaaaccatatcaggatataaacgataaccaccttcggtaacaaaacgctgtacaagtccgaaacatttgaaccaagacatggtttcgcttcctgcacgaaaatccatcatattgacccgtgcctcagctgatgcgtcgaattctccctgacgtacatcttccggatgcccttcacgataccccataggatcaagccaataacgatgctgattaacaatccatcctccttccattatgataggacgtttatagttccaacgagcagcaaactgtttttcccaatcctgataataaccgttcataccaaaagcatcatgacgcaaactatatcccttgtttatagcactctcaagcaagccttccgtttcagggtctaaagccccccagccggatgtgttttcagcaccaatcaaacgatgatagttaataactaacggcactttggtaaagcatcgggaatacaaatctgtaatccattcgaaaacctgcttcttttttgaatgatcttcataaatcattgtatgtgcttcaccccatttccccaatccgtaagcatctataaagtctactttatccggatcgttaaattcctgtgccagtgcttcgatgaacttagtatatttttcctgaaagatcttatcatccggaaaaggtgatttacgtgctaatgcagtcgcctcgttagtaggtcccgggtctttataccaatgtgcaccggcgtcaaaaacatattggggagtatttaatccttggtcacgtccatccactacaattcggaatgacaaacgcatcccacgatccaaaacacttttcagcaatctggtcaaacgggcagtcggatcttgccatatatatttcccttcttccggctccaatgaactccaacttgtccgtatatagcaggtactggcataatctgaaacttttactggttctgccagttccggtacagaaacattatcgtaaccttctgtagtccagaaattttcatcccaaccacgtcccatatagatcacccatccgtttaatggattacgcaatactgttttcttatccggagtgattttcactgtgacattaccggcaggcagttcaccacttccatttccttcatcaccattattatcaccacccgaacatgcggataaatttgctgaacagaaaagcaaaagaactacactccaacttttcataacagatattgttttttctattttcatatatttcgatgttgatattaactattgccgtatcttgtgcaatacggcaatagtataaattcaatttatttatatgctacaatctttttatttcgcaagtctaaaacaacaagagtacttgacggaacattaaagtatgagttgcgttgttcaccatcagctcctcctgtaatcgcctgcgacacaccataggtaagcgtcttttgctgacgcaatccattcaataatgcaggagagaagcaataagtattatttgccttaccacttatatttgctataaggaactttatttggcttcccgatattggagttcctttatgtacaagtacttgcgggtcggccaaacttggcgtaaagcttccatctacaggtgtaccccagccatttatattaccatgcaaccacaaattcgttacagtagtagttattatatcttcagcaacatctgcattatatttccattcgagtgtcaatggttctagttgtttacttggcggataaactgacactgttttcgcttgcatatcaacaacaacgcgatgctcacctgtttccgtaatcttccatccgacagccgctcctttttgtctcataactacagataatgtatctattttatcggctgacaatgcaacatcatccccactttcgggactgatataattaatctcaccttcaaactcaacaggtatcttcaacactcccggtttcaaatccaacaaagctgcatacagatattcattttcctgtgtcaatgtcatttgtatcttatccgcacctaccgcatcaccttccaggaatactttatcggcatcaaacacaataggtttataaggacgcacatctacattgattgttctcacttcaggcatcgcatatttagaaccaccatcccatttggcaagtacacggaactgcaaagtagcgggtttagtataagtccttccccacttttctaccaatagcttctgcaattgctcggtcgtatagcttctggagaaaacaccttcatcctcttctgtgcgtacactggaagcaaaatcattgccttcaatatctaactttgtgacataagtaaccgaatattcttccggcatctggcgcgcttctgtccaatcaaaagtcaaaaccaccttattaggttcgttaccgtcgagttcgatatttgtacttgacgcatgtacttccaatgtttccgcagcagcaaaaaaatcactgttgtccacattatcatcatcattgcatgcacttaaacaaatccaaacaaataacggcagtatattatagaatgatataatttttctcatatttatcattgtttacttaaataaaacattatctccaccatccaggcaattgtctcagattagtattcttatcaatatcatcctgaggaatcggccaccaataactaataaatcttctggtttgataaagggtacgtttataatattcatctctttcggtacttttagccaaggcattcattccatagaattttccattcaaagctgtttcagcttctttccaacgacgtaaatcatcaaaacgtataccagcttcacaattcaactctacacgtctttcacgacgaatcaaatcacgcaattgagcttctgtgacaggtatctgatccgctccctttccatactgaggaataccagctctataacggactctattaatataatccagaatttctgtctcattatccgtatatgtgcccattgccacactatactcatataatgattctgcatagctcagataagcttctgccaagcgataaagtactccttgacgttttttgtaagtaccgctactagaggcaggaatcgcagaggggtcaacacgtttacgtatcaaataccctgcactaggagagtcatgagaaggaccaccatcttcaccacctgaaaagaaattggcaaacttattttttgcattcgacttatcttttccccagtgatactcttcattataaagtactgaaatataaaaacgaggttcacgaccgcaatacatcttatatgtatttttaggaacaatcacatgctctgtttcctgttcagtaccgccttttgtagcatacatccatgtagtcttatatgactcgtcaactgtagaatatcccgtctcactgtatcctgattcagaattgataactggagtagctccatcatttgtataacctgtgataggcactaaaccattgttcataaagaatgcatccaccaatgattgggtaacaccaatagcacctgcaccacccatactacgaggattagcctgacggtcaaaataacctgcatcatcatatgttcgtgggaaaaggatttccatatttccttgattataacgtaacatcaatgcattctgataagattgaaatgcatctacatcatctccaatcgtctcaatatataacttatgccccgccttttcagcctcatctatcagcaacttattagcatcaacagcggtcttccaacgttctggtttgaaggttgaatcaaaaatagaaacaccatcacagtttttcatattcaccatgtccgggtcctggttaccattcaccaaaggactagcagcaaatgtcaataaacgggcacgcatagcgagacaaataatagaagtgatacgcccatatttattatcttcatcgtaataagccggtagcaatttagaagtctccaataattcatttgcagcccaatccactactgtattaaacggctcctgcttcaacaacagggtttcacctgtaatctcttctgttgcatcacgaataataggaactgctccgtaagtcatagccatcacagcatgaaagtaagcaatgaaaaagcgacattcggctttcatataattcacttccttctctgttacatcaggaagtgcatgcgcatatttaataaagatatatgcttggcgaatacgcataggaaaagtctcccagtagttaatcacgccaccgcttgcagacgtccagtttccattctgataaagaatagccttaaatccctgtgattcccaaccaacagaaggtgccaactcgtctgctactgcatctgcaccatcataattatagaacttgggagtagcattatatatataagctaaccaacgttccatatttgttttattctcaaatacagtttctaatgtcaactgatcatccggctccttatccaaatagtcagaacaagaagatagagaaaacatggcaatcatgcctaatgctatatatttccttattttatttttggtaactatatacaatcttacagtttaaagccccttaaaggttgtaaattttcaaattaaatatatttatttatgtaattattattttataataaaacacacaaaacaaattagttaaaaacaacaaattattttgattaccagaacatatttcatatctttgcttccaaagattaaagatatgaaatttagaaaagatatacaagaagatgttgaaaaagggaaatttccgaaagccttaaagccaattcatttattgccgagattttcatctcttaagaaaaagaaaaatatcgacaacaggatttgtaaaaaacaaatatataaagaaataaaagaaacggaaaataatgaagaatcagaatcaatttttcaatattttgaataaatagcatcaatagtataatcaagccattcttttggaaattgacatttaggatttttatttctttgatatatccattctctaaaaacataaatagagatattgtatttctttaattcttttcttaataaagctaagtaagttatttcttcattatcttcatttataaaagtagaatttttaaaagctctttttatataaattctctgtttatttcttatcatattaatctctttattagacgttacattttttcttttctacaaaggtaaaaatcctttatgcaaagtctaataaagagatgtgaaaggtagttaactatggaatacttctacttttaaagataattttgttgtagttttttctttacttctttagttacattaataagttcaatagtatatttcccgtcataattaatatatttaatagcatgaaatccatttttagtaatattgtctttacaccattcttgtatttcattgggaactgttttgtaatatttaaatttatcttttttcttttctactccatatattcctttttctaatgatttagttttaacacttattttcttgctataaaatacagaattttgatatttactataatttatcccatttattgtacaataatgatgttgagaagatttccaataaagactactcaattccttattaatatcatcaccggctatactaactacatttgtatttaaaaaatctgcatgaatcaacacatttacaatagtatcaattttttcttttttcggcttttctaatacatcccaatattccgatttttttaaaagcttatttgtataataatcataaactttttcttccacaatagcatctctatttaatgttgacaatatattttcaacttctttctgccgtttaagttctgcttgttttttacgttcttcttgaatttctttttcttttattattgcatattccttactaaaccttttttcaaaataatttagtacatcttgtttatattctgaattaaatgaatataaataatacctagcatttatcattgctggattattagattcaacaactaattcaacagtagttttccccgtaataaattcgtgttctttatttacactaggattaatctgatataccttataaatatcttcattgcaataatttaataataggttatctgccatttttttatcagttattatacattctaaaaaacaaatgcctttattattaaacacaacatacaaaatatcagaattgtaaggatatgaggaatacatatatgcttcatatccaaaactttttatatcatttgtttttccattacctttattcttttgcatttctttttttaccagtgctttattttttcccaaaaattcttgtgaatcaatacttccaattaatgtaaaaagcacgataaatatcaatagtagtttcttcataacatacataaaattaaaattgtacataacatggttcaaatataataattacagttgatgtgaaaaagttaaattagcgaaaatgatttgcataaaatttatgcagctataatatccaaataagttatcttaaaataggagttacgcaatagtaatttgaatttactcgaatcctttatttttcttgtattgtatctaaaagtaaattcattagcatataattgtagatgctttttgcttatatggtgatagatacctataatacctcttttgaatatagaccaaaatccttctattgtattggtataaattcttccgtcaacatatttacctttaccatggtctacactataatgataaaacatcttatctactgcattatatcctaaccattcatctgtatataatacagtatagtctctttttacaaattctaatattttgggagtcaattctttttgagatgtattttctacaactcgggtgatagcatctccttttctttgcaacattccaaaaacaggagttttatctttaaagcttctaccttgagcgttttttacctttttatcccaatgcctatttttgtttttgccaccgacaaaagtttcatcgcattcaacttcaccactaagcctacctctatttctacaaataaaataagttcttatcttttgtaatatataccaagctgttttctgagttatcttcaaatctcttgacaactgtaatgaagatataccttttttatgagctaatactaaccatattgccatgaaccattttcttagtggtaatttagtaccatgaaatattgttcctactttaacattgaatattttctgagtattcttgcacatatacctatgattaggtaaataataaactttcgattttttatcaaatggagatttgactttaccatttctccaacgtaatttttctaagtaaacgatacaagattcttcatctggaaaagcttcaagtaattcaattagagagttaaatttagatacatcaatcatgtttcctcctttgcatttttattattaatattttatttataaatcaatagatttaaatattataattaattgattattagatatttaaatcttaataatgcaaaggtatataaggaaaatgtgattaattgtcaaagctattgaagaggagttaataggggttacttatttttactaaaataattgattgcttttatgaatttcgtatatttacaaaaaagtcagaagttaattttaatacgacccatttcttccaaaaactctaaaaaaggaaaggaggtacgtatggaaaattacatagaagtaaaagttgctgaatacccagaaagaactgctcaaggtttagcatgggtagtcatattcaaaagaatatatttataattgttttactccttaacttctgactttattttttaattatatatctatataaaaatatatattacaataaaaatattttatattttaacaagggttaagctgtaagattgtatatagttaccttatttttcatacaatcaattcttagaatttaatttcaaaacctgcagatatagatttcatagctggataaactgcaccagtcctcgaagcaccactatccgatgtaacttccggatcccacaaatcaaacttagagaatgtcagtagatttgagcctctaacaaaaatacgcgctccggagatcaacatattttgcatccatctcttcggaaaagaatatcctaattctatatttttcatgcgtaagaaactcatattacgtaaccaccatgtagaactctggctattattagcatttgtaccataatctaaacgtggataaaagacatcctgactgggattatccactgtccagcgatcttgataattagtaaagatattataggttgtacccttatttgacgcaggaataatattgccagaaagaacattccatgttcgaccgataccttggaataacacaccaaaatctaaatctttccacttcatatttaacccaaacccataaacgatttctgggtttatcggccccccaattggagatacatcaaatgcatcaatcttcccatcttgatttacatctacatatttaatatcacccgggcgcaatttagcagtaaaggtttgcgcaggaataccctcttttaaagtaccagctgcaacatcagcaaagtcatcatttgtaaacaatcgttctgcaatatatcctctattttgtcctgttggatatcctgtttctgcccgatttgtaccaacaacagctgccggttcgtccttttctgtaatctcattatgagcatatgtaagtgtccccatcaagctcacaaacaagttcttattaaactgtttattgatattcaatgtaacctctgccccttgattcttcattttaccataattatcccaaggttgttttataaatccggcagttattggaatcgattcacgaggcataaaaatattgtgacggcgttcgtcaaacaaatcaaattgtaagtctaccataccattaaatagtcccaattccaatcccacattcgctttatttactacttcccaagtcaaattaggaactgcaaactcaccttcagccataccattacgattatacccgctctcggtaccccagttatattgtttcaaatcatcccatgaatcattgatagtagaaagatatgcaaaacgtcgtccattcaaagttgcattacctgtttgcccataagatgcacgtaatttcaatttagaaatagttctacgaaaaggttgcataaatgattcttctgacacaatccaaccaatagcccctgaaggaaaaaaaccataacgttttcccttagcaaaattttcagagccattatatccaaaattgaactcccctatatatttccctgaatatgtataagaagcacgtcctgccattccctgagttcgataaggtagtttctctcctttatcaaaatgacgacgattaaataacaacatgccagatactgcatgtttttccgcaaatgtatgatcataagacaaggttgcctccatatagagacttttagttccataagtccctgtagattcatgtcctaatgtattgcttccattctccttttttgtcaacatcaattccccctcttccgttcttccagaagctgcattatatatatcaggctttgttgaccgttttactgtccccgtagaataacggtcaaaagaaaatactccttttacctttaaccccggagttataaatttcaagtcttgttcaagtgaaaataatgtttcaatcttactagcactagtacgctggtaccccatctgagttgccattgcccacacattagactcctcagttcctgcaatttgtcctgtagaatattgtgctggaaactgaaatggaacagaacggaaagctctattaaaaatctcacttacactttgtgttgtagaattacgatcttgcaaatatcctccaatattaaaacgcagctgtgtagttggagatagctttaaatcaacatttgaacggacattatatctctgcagcttaatagaaggatcccactctcgctttttgtcacgttccaaaataccgcgttcattataaacagcggccacaaatgaataacgtaggatttctgtaccaccagagatatctaccgtcacacgctgattggaagcatgatccttagatactgcgtcaacccaatccacgtccggatataaatcaggatcataattggcacgagttttcgcaattttatcagtatatataggtctctgtcctgtatcgattaaaacatcatccaataattgcatgtaatcagcagccccaatatattccggaagttttataggttgtgtagctgcaaactctgcttttacagttacacgtggtttccccacctgtccccgttttgtattaatcaagataacaccattagcaccgcgtactccataaacagcactagcggcagcatctttcaatacagaaaaagactcaatttcttccggatcaatattatttaattcacgttcaataccgtcaactaaaactaatggatcgccaccaactttttgaaaggtactaataccacgaatccaaaaagttgaattatcatatcccggttcccccgaacgttgaactgccaatacacctgcaaccgtacctgctaaattattactcaacgagcgactggtagatacttttaatttcgcaggttcaattgttgtaatagaacccactacagattcttttttttgtgcgccataagccacaacgacaacttcatccaactgaccgacatcttctaccatctgtacattgactacttttcgattatcaacgacctcttctttaggcacaaaacctatataacggaaagagagcactgacctctttgcaggaacagtaatactataattaccattcatgtctgtcaatgaatgtactgtagaatcattttttagaataattgtcacaccgatcaaaggttctcccttctcatctgaaacgttacctgttacctttatacctttttgttgtgtagcttgctgtactttaggagcttctggtatcgaaattgtaatttgtcttcccgacatcttataattcagtcctgtctctgaaaacagctcttttaacacagcatctattttcttattggaaactgaaatggagactttgttattcagatttttctgaacattagcagagtatataaaaatatatttactatgtttttcgatataatctaaaatatctttaactgtagcattctcatactgtactgagaatagatcttcttcggaattccaactaatagaattagcaccgaatgaagaaaatggaatcataaaaaagacgtttataatgcaaaaaagcttaagtcttttctttaagtgtaaaaaaatacttttctttaccataaaaatttctttttaggttaacaattttggatttattgatttaactcaaggaattactatcgggtaaatacggcaatatttatccgatttttttgtgtatcatgaatagtattatctgtttctcataggctatattgattttataagattaattaaattgtcattatttactcaagtatatactagtatcacttttttctacttcaatagggattgtctgccggatacattcaatcacctcatcaatatcatctttcaaatctagttttccataaaccttttctttacctaccatcggatcgcattgaataggaatgccataataaatactcaacttctgaataatatgagataaatcattaccatttaacaacatgacaccatccacccagctaatatattcggctacgtccacttgcttctgataggcaattgcgccattggctatattcagcaaatcactaggcaccagctgcgcttttctctcattcctatcggtcacctcaacagaaccttccaccaatacaatattagttgccccccccttgtagtttgaaatattaaacttcgtacctaatacccgtaatttgaaatcttcagattctacaatgaaagggtgttgcttatcatgagcaacttccagaaacacctctccctgggcatatattttacgaatatccccattaaaacgacaaggataaatcacttttgattgagagttgacaaccaatcgggttccgtcagacagttcaacccgcactcttttccctgcgggaacaagtaactggttatattccggttcgccctttactttcttctcctctttttctcttattactttagaattaacagcaacctttccttcttttgaataggtaacaaaagcatcctcatccaaattgagctgttctttagcagtgataagagtcacttcttcaacagactggctgtccatctgttcggcaatagcctgaaaatctaaattagtgttttcacaatgagttaagaagtggatggttgaaatacaaattaaaatagaagctgcgacagaagcagaagctactaagaaataatttcttcgacgcctcattacatctctccggattttttgtttggttcgctctattatagaagaagcatcaatcttttcatgcccgcatttttcccaaaagaatttcagtttcccgccttcaggtatagcagtaaaatcatcctcaagcttttcttgagaattcagtttaccaaataaatcagcaaggcaatggtatccttttaagtccataatcttctttaatgttgttttataaataaagacgcaacattcaaaaaaatctcctagttaaaaatgaactttttttatttttctcgaaaagtaaaaatagcaagaagctcttttaaacaattaagcccttaaaatacaagcaattaacagtataccttcaatcacttcttacgcaaaaccagattcagattcttagcaatttcttctaaagcaaaagcaatatgattattgatagtcttcacagatatatttaatatgtctgcaatctctttataaggcaacccatccattttagccagaaagaaaacatgtttacacttgggaggaagttgttgaatagcctcatttattctggctatctcttctttactaatcatcttttcgtccggagattgaaccggatcaaatatgaattctcctatctcatcaaacaacaaatcactttttcctgtttctttcctcaaaaaggagatagcctttcgataagtgattgtttgaatccaagcatccatattattaatctgcgccaagtcttttctatttttccagacttcaaaaaagacatcactgactatctcttccgctggctctttttgtcctaataatgcaaatgcatagtgatataaacgcgaagaataatgttccataaaacggttgaaagcgaattcatcaccatttacaattttacgtatgtcatcattttcaagtctcacagaagtatttacagattatttctaattaacaaaattgtgccaaatatagtagtatattagcaattataaaaataaaaaaccacaaaaacggattaaaagttatcaattacgaaagattaaaaagtaacttggtaggacgtgccatcagagatagattcttttacgcctcacgcaataagttttcaaacatggggttcacctttcaccttttcttcgaaaccctttattcatcgagggtagcgggtgaaggctcttcttttcaccgaatttttccctctgaacgctgtaccgtccttactttagtggttctttttcaatttagttgactggtcattatagcccactacttcatctccaatctattaatagataagttctgtttcattaggagtaaaattactttcgtctaatagtaaagttatttccgatagtacggaaactataaacgcaaattctgatcatataaatgcaagctttgtttttataaacgcaagcttcatttataaaaacaaaacttgtatttatagtttgcatccattgaaaaacaactttactcctagaccaaaagaagtttgcataggagcaaaagcaacttatccagtaatagactacatgtaagctattactaaattacataaaagaatgactcaatcatcattcatgcatttgcatccggtacaattcaattttttaattaaatacgaggtgaaggagtgccccttcacccgctatcgctgatgaataaagggtttcgaagaaaaggtgaagagtgaagggtatgttctcaacatttcctgtatggtcacttaaagtgatgcttttagcaatcagaaagcatcgggacttttgaaagacccaaatattgatttataaaagcctcttacttaaataacgtacaggataccacacagaaaggaatccgactgccaaaacggtgataaaaataagtaccacatcccaagcgtgaacgctgacaggataggcgtctacaacaaaagtaccaccaccgcctcccaatgaaattataccgaatttctgttggataaaacataggattaagcccaggacaataccggaaatagcgccaaaaagagaaatgagacgtccttcaaagaggaatattcgggagatgagtttatcactagctccaagactccgcaaagttactacatcatccttcttatccaagatcaacatagaaagggagcctatcacattaaaacaggctatcattaaaataaaagtgaggaacaaataagagattagtttctctatctccataatacggaaaacatctgcctgttgctgataacgattctgaacaacaaaatcatcacctagtatgttttctattttagattgtaccgatgaagtatttacattagatttcaatttcaattccatcgcagagacttctgttgtataatccagaagctgacgaagaaaatcaagagaagtcagaatatattttccatcatattcttgctgattcaccacaaatacgacacccggagaatatagataatcacgattaaaagaagcgccgggatttgccatgttcactttggcatttcgcttgggaagatatacctgaagaggatcgacaaactccaaaccagttcccaaggtcgcaaccaattccactcccatgacgccataattcacgatcgaatcatgaagaacgaattctcccgcgccataaagtatgctgtctatggccgtcagttcttcaaaattatcctccaccccttttagtacaaccatagcctgacggtccttgtattgcaccattgcattctcttcgagcgtctctgtaaacacctctacttcaggaagtgcacaaacagcgcgaatccgtttatcctgcgcatcaaagacttttccttcacgaactgttattttcaattgcgggtcaaaagccgtaaaaaagctagcgaccatatcctgaaaaccattaaaaacggaaagagtgcaaaccaaagcaagcgtagcaagggctaccccacatacggaaataccggatatgatattaatagcgttatgctttttttttgagaaaagataacgcctggctatataaaaagggaagttcacctctgcaatgagttatttcacttcagcaatgaatctattttctcaatataatccaatgaatcatccacaaagaatttcagctcgggaatgatgcgcaactggtgacgcacacgagttccaagttcatagcgaatggatttcatattgttattgatattcttcaccatctcttccgctttctccgaaggaaaaacactgaggtaaacacgggcaatactcatatcaggactgatacgaactgcactaacagagaccaatgtgcccggcatggactttgtttgaagcaggaatatctcacttagctctttctgcaacaggcgagatatcttattctgtctggttgtttccataaatctactcttttatcttacttttttcttataatcgttaatccgtcacgtaaaggcaatatcactttttccactcgcacatcttccgccaccaaatcattgaaggctttaataccaatcgtctgtgcatccgtgttgcgaggctgttcgagaacatgaccgtcccacaaagtattatcagcaatgatataaccgcctgcagataaatgcgccaacgtcatctcgtaatattcaatatacttacgcttatcaccatcaataaaagccatatcaaaggtaacacctaaacacggaacaagttctaaagcatcacctatataaaaacgaattttatcggcaaatggtgatttttccaaccatggacgggtaaaatcctcttgttcatcattgatctcaaacgtatgcaacattccaccttcggccagaccttctgccagacaaagggcagaatagccactatacgttcctatttccaatatctgacggggccgaatcatttctacaaacattttcagcatccgtccctgcaaatgaccggaagccatacgaggacggagcagttttacatgtgtgtcccggtagagcgattttaaataatcgctctcgggatcaatatgctgcaaaatatattcgtctatcgattcggtttcctgcataaaacttacctctttaaaaattaaagataacggttgttgttaggtaatacagtctcctctgcatgcttcaaagcatcttccactacattgatttcgaggaatgaggtctttgttcctgccttaccactactcaaataaccaaccatatcagaaggctgtaaacgaccttctttcaacaaacggcgcaatgctgcaaagtaatactcctgtccgttagccaattccggcatatagatagcttccacaccataagacaaagccaaatgacgcatcgtcttttctttataacagatagccaacaccggatactttccacggaaagctgccagattgcgggcagtacgtccgctatagctatcagtaataatggcacgtatttttagtttagaagtagccttcacagcctgtttagcaaggaatgccgtaacatcattactattctcatccaatggaatacggatatcattttcctccaatttatctttttcagcctgggcagcaatcttagtcattgttctcactgcctctaccggatacttaccataagcagtttccccactcaacatcaatgcatctgtacgatagtagattgcattagcaatatcagtcacttccgcacgagtcggacgaggattatttatcattgtatggagcatttgagtagcaacgattaccggcttctttgccaaaatacacttgcgaatcaatacacgctggattcccggaatacgttcttgaggcacttcaatacccaagtccccacgggccaccattacaccatctgccacttccagaatttcatcaatattatctaccccttcctgattctcaatcttagcaataatcttaatatcactattatgagcatccagaatttcacgtatatcaagcacatcctgacgattgcgtacaaaagaatgagcgataaaatcaatatccttttcaatagcataaagaatattgttacggtctttttccgttaatgacggaagattaatgcgaacacccggaacatttacgctcttacggcttcccaaagtagcatcgttcttgacttcacacaacaaataatcgttagtcttatcaataacttccagttccagatcaccatcgtcaatcaggatcataccaccgatattcagatcggacacaaagttcgggtatgaaacagcaatacattcacgtgttgtctccaaatccggattgcctacaatctttactttatcacctgtcttatatggaattggttctgcattagccgtcgtacgaacttccggaccttttgtatccatcaagatcgcaatacggttggacacagcacgtacatttgcaatcaaagcttcaaaaccttcacggctagcgtgcgctgtattcatacgcaccacattcatcccagcttcaaacaactgttttataaaatccacatcgcaacgtctatccgagatggaagccacaattttagtctgtttcaataacatagtctttctacctattatatattatattaccttatttattatctatctaacaaagcttccaaggccaaacggtacgaattcaacccaaagccacaaatcactcccttgcaggcacaagcaatcatcgatacgtgtcggaaagactcccgattatgcacattggaaatatgtacctcaatcaccggagacgtcacagagcgaatagcatcctgcaaggctatggaagtatgtgtatacgcacctgcattcagaatgatgccatccacatcaaatcctacccgctgtatgcagtctatcatttcaccctcaatattcgattgaaaatagtcgatctccacgtcaacgtatcttttgcgaagatcagccaagtaatcttcaaatgtaacgcttccgtaaatggaaggttcacgcttacccaacagattaatattcgggccattaataatttgtatcttcatcgcgcaatcctgttttttatatacctttgtatccaaagaacaatatttcaaggtgcaaaggtagaaaaaagaaatggaaatcaacgaaaaaaagaagaagaaggaacaacaagaggtgataatcaggaagtatcagcagtatctcaaactggaaaagtctttatctcctaatacgctggatgcctatcttacggatctggacaaactgataaactttttggagcaggaaaaggtagggatactagacgtatgtttatctgatcttcaacattttgcagccggattacacgatattggcattcacccccgttcacaggcccgcatcttatcaggaatcaaatcattcttccgttttctcatcattgaagactacctggaagcagaccccagtgagttattagaaggacctaaaataggctttaaacttcctgaagtactgaccgtggaggaaattgaccggatcatctctgccgttgaccgcagcaaaaccgaaggacagcgaaacagagctattttagagacattatacagttgcggacttcgcgtatcggagcttgtcaccctcaagctgtccgacctttattttgatgaaggttttatcaaagtagaaggaaaaggaagcaaacagcgcctcgtccccatctctccacgagccattaatgaaataaaactttacataccagaccgtaaccaaattgaagtaaaaaaagggcatgaggatttcgttttcgtcagccaacggagaggcaaaggcctttcccggattatgatctttcacatgataaaagaattagcggaaaaagcaggcattaccaaaaacatcagtccgcacactttccggcattccttcgccactcatttactggaaggtggagccaatttgcgagccattcaatgcatgctcggacatgaatctattgcgacaacggaaatctatacacacattgaccgcaacatgcttcgtagtgagattattgagcatcacccgcgaaatatcaagtaccggaaagaaaaagaggagttatttcattaaattatgataaaatcagccccttatctatatatttatattaagaattaatatctttgcgttactttttctgtgcgagcagaaggaggttgacaaatagacgatatttcaattacaaacatttaatttatacctaaaatgactaagaagttgtacttgcctttactcatggcaatggttgttgcattattctcttcttgcagcaaaaaaatgggtgaattatcagctgattacttcactgttactccgcaagtgctggaggcagtaggtggtaaagttcctgcgaccatcaatggtaaatttcctgaaaagtatttcaacaagaaagcggttgtagaagtaactccggttttgaaatggaatggcggcgaagctaaaggccaaccagctactttccaaggtgaaaaagtggaaggtaacgaccagactatctcttacaagatgggcggtagctacactatgaaaacttctttcgactatgttccggaaatggctaagtctgaattgtacctggaattcaaagctactatcggtaagaaagtagttactattcctgctgtgaaaattgctgatggtgtaatctctacttctgaattagtaaacaatacattaggtaacgctaaccctgcattgggcgaagacgctttccaacgtatcatcaaagaaaaacacgatgctaacatcatgttcttgatccaacaagctaacattcgttccagcgaattgaagactgctaaagaattcaacaaagaagtagctaacgtaaacgaagctgctaacaagaagatcagcaacatcgaagtttctgcatacgcttctcctgatggtggtgtaagcttgaatactactcttgctgaaaaccgcgaagacaacactactaagatgttgagcaaagacctgaagaaagcaaaaatcgacgctccgatcgatgctaaatatactgcacaggactgggaaggtttccaagaactggtttctaaatctaacatccaagacaaagagttgatcctccgcgttattgcaatgtaccaagatcctgctcaaagagaaagcgaaatcaaaaacatctccgctgtatacaaagaattggctaacactattcttcctcagttgcgtcgttctcgtttgactttgaactatgaaatcatcggtaagtctgacgaagaaatcactaaactggcttcttctaatccttctgaactgaatgtagaagaattgctgtatgctgctacactgactagcgatcctgctaaacaagaagctatctatactcaagctaccaaacaattcccgaacgattaccgtggttacaacaacttgggtaaattagcttaccaggctggtaacattgacaaagctgaatcttacttcaagaaagctgccagcgttaatgctactcctgaagttaacatgaacttaggtttggtttctttgatgaagggtgacaaaactgctgcagaagcatacttcggtaaagctgccggaacaaaagaacttggcgaatctatgggtaacctgtacatcgctcaaggtcaatatgaaagagcagttaactcattcggtgactctaagactaacagtgctgctttggctcaaatccttgctaaggactacaacaaagctaaaaatacgttggctaacgtagaaagacctgatgcttacactgactacctgatggcggttttaggtgctagaactaacaattcttctatggtaacaagcagcttgaagagcgcagttgctaaagattcttcattagctaagaaagcagctactgacctggaatttgcaaaatacttcacaaatgcagatttcatgagcatcgttaaataagagaattaccactctattttaaatattaagaattgcctgtcattataaatgacgggcaattctttttttttatccgtaaaaaccgtactttcgcagaaaagaattcaaagcaatgaaaaagagcagcattttaatccttataatcatctgtctgtgtggttgtggcaaatcttctaagaaaacaagcataaccggggaaatcaagggactgggtacagatacgctctacctgtacggaatggacgaatcctttgatcggatagatactattttcgcgaacggagacaaattctcttacaccacctccatagacaccataacttcggcctatctgctgattgataaccagatagaatatccaatcttcctcgataaaggaaaccaaatcaagataaaaggaaatatagaccacctcgaatttctggacatcaacgggaataaatataatgaagagttcacagcctttcagaaagaactgggtagtttaaacaacccttccgaaaaagatttagagcaaaaggcagaagaattcatcacggcacatcattcttcttttgtcagtctttacctgttggataaatactttgtgcagaaagactctcctgatttcaacaagataaagaaattaattgaagtcatgacaggaatactgcaagacaagctatacatcgagcaactgaatgaagccatttccttgtccgaaaagacagagataggcaaatatgctccgtttttcagccttcctaatataaaaggagagaaaattacccgttcatccgaagatctcaaaaagaagaatctgttaatcaacttttgggcctcatggacagatagtatttccaatcatcaaagcaatagcgaattaaaagaactttatcaaaagtacaaaaagaacaaacacatcgctatgctcggggtctcctttgacatggacaagaaagaatggcaggatgctattaaacgtgatacgctcaattgggaacaagtctgtgattttggcgggctaaattccgaagttgccaaacaatatgccatcaaagaagttcccagcaacattcttctgtcggcagacggtaagattctagcgaaaaacctcaaaggagaacagttgaaaaagaagattgaagaagcagttacagctgctgaagaaaaggaaaaacaagacaataagaagaaaaaataaccagtaatcaaacgtgttaattaaagtattcggagcggctgttcaagggattgatgcaacactcatcacaatcgaagtcaacagctcgcgcggctgtatgttctatctcgtcggccttccggattctgcggtcaaagaaagccatcaacgcatcatctccgcattactggtgaatggttataaaatgcccaccagcaatatagtagtcaacatggcacctgctgacattcgaaaagagggttcagcttatgacttgcctcttgccatcggattattaggagctaacgaaaccatctcttccgagaagttttcccgctatttgctaatgggcgaactaagtctggacggaagtatccaacctatcaaaggtgcgcttcccattgctatcaaagctcgcgaggatggtttcgaaggactaatcattccccaacaaaacgcacgggaagctgctgttgtcaatcaattaaaagtatatggagtcagtaatatcaaggaggtcgtcgagttcttcaataatgaacgcgaattagagccgactgttgtcaatacacgggaagaattctatcaacagcagaccaactgtgacctggattttgcagacgtaaaaggacaagagaatgtaaaaagggcactagaagttgcggcagccggaggacataatttaataatggtaggcgctccgggcagcggtaaatcaatgatggccaaacgccttccttccattcttcctcctctttcactgggtgaaagtttagaaaccaccaagatacattcagttgccggacaactgaaacgcgggtcctcattgatttcccagcgtccattccgcgacccacaccacacaatttcccaagtagtactaattaactattaggtggctgcttacactttttattcaagaaagaaatttattatcattttccctttaataacctaatggctattacagctataattatacagtctaaagatattattaattctttcaataattaatatcaagctaaccttgttgttaaactaatattcaaattctcctcaccttcattaatgttctctaaatcaataagaataggttctgtaatatgatagtacgtctttgcttttctacaatatccctctgctgccatttcacgggcaggtataactatattacaatatgttacccccactaatgcatgatctttggttgatgagtatattataccatcaagcatgtcctgctttttaatatactgtaatagaagttgtgagataatgtattctggtttgaatggctcgtcaggatgcgcaactttcattaaacaagataaataaaatgggtaagtagataaaaaactaaatgcaaaatgggcatctgtttctataatagtttccaaacattcatctggaattactaagtttatcagtgataaaagtttatgattctcgaccctacatgcaaatacttgttcttcagactccaatgatcgtttaatttcattccaacaaacttctaatgatgttcctaaatataaacatgggaatccgggaatactaaatcttgctgacgaaaccttttctctcatattaaaaggaacatgaaacattttctccttagataaagtttctttagatattcgcattctatacaaattaataagctcttctctccattctaataagaaaaaattgcccaactgatcattaagataattatttgcatatgcacaacggacactacttctacttggagcaaatttatttctcattaacaaattctctaaaagtttatatgcttcatccggatatccttcgtaataaatactaattatcgagctgattgtctgttggactttcttaataaaggagataaactttctttttgttagatctataattattggtgaacctacatttctaaataaagcattaaaatcaacatcatcaatatcatttagcaatgatatatattcactgaattcatattgcaatgtttcgatataagagctacctgtcctttcaagaggtagctgatttctcatttgatttaatgcttcaaagactctcatactttattataattaatgccagttaggcaattatatttaactttatattgaataacagcaacacaaaaaaaaagagtttaaattttccactttctaaatgttatacctcataaaaacaaaaattcaacaagattctatttgacaaatcatttttgagttaataatgcttttgaaataatttacatttctctaaaatggataaatatcgctgtctgtatcactatttgagaattgaaactcacctttagataagcattttaaatattgctgcaaacgaatcctattacttcttgaaacttgataattttctttatgtcgcttatcaatctcagaatgacatctaatacaaagacatttcaaattatactctcggttatccagtttattaccatttatatggtgtacctctaaaaatcgcttattaaatccattcagaataacaccacaattctcacatacatattgatgtttctctcttatatattcactaatcttctgccactccttaacatatccgaacatatcaatatcaacttgttcgggcatttcgttttgttcacttcctcctaaagcatcatagaatccctgagtattagataccgaatttaccaacaatgcctttattccaaccatatcttcaccgaaaagttcttccgcttgcatgttatgtagcatatgcctacaatatccacataaagataaagatacatttttaaattctttaccagtcttacgttctataatatcattggtgttagctgtagaaaaagaataatattgatcaaagactcccttatctaaaaaattccgaatagtctcacattcaaatatatgaaatttaggaagaccatacttatccactaaatatcgtgtttgatacatatacccttgacgcttaaagccattctcatctaaatagaatattcctgttgatttaaaatcaattttaccattagtataagcttcttcaaaatcaacccgaataagtttataccctttcgaatcccccacaatgcagccattgtttttcaggaatttctttagagcatcaaaagtatataattcactcataccaattatttctgcatatcattaacaatattctcaataagttcttcacttgtggtaattatacgaaattcaactctacgtgagtaattagcatttattggttcatgcgataaaaaactttcttgcttattatcatcaagagtacgcccataggatagtccattagctgtaatccagtattgtaattgctctttttgtttttcagataggttcttataatattccatctgtctaaaatattcaagaactttagcagatctctcttgtgacaataaaacattcccgatataagggtcacttgatttactataaatagccaatgtatctgtatgaccttcgatccgaatttctttaatcctcgttcgatattcttctttcaaaagaatattaaaatatctaggtaaaaagtcatttaatattttctgaaaggttggagtaacatctgatttacctagagcaaatataacttggggatttgtaaaacgaatcgataaatcttttcctatctccatctcccattcttttttctcttcatcaaaagcagaacgtaaatccttatatatagctgatttagaatcttgaaagtctgtaacaaccttctgacgctgttgctcggctttttgcacttcaagaatatacgagatcgcaacaaacataaaaataaccataagtccggtcattaagtcagagaatgacatccaactattattcttacttcccattagctacgtcttttattatcatacatggcttgaatacaagcatctaagtttgccaatgtattatttaatctttcgtagaattcctcgttgagcgtggacacactactatttaaagatttagaagcattaacaattatgctaactccctcattcatgttttttctagtttctcgccagaactcttcattataatcttttattttatttatttcatctaacttcttcactaatagacgaactccatctcccatatctttgtgattgcgaatccaagtgtttagttccttcgtagcctcgtcaaaagcttctgtaccttcatggactttagatattgtatcattcaactttaccgttatttcttcaaacttagtatcgtcaatcaatactctttggagttcttctatcaatcgttttaggtggctatcatcagctattaaagaatgagtgttatcggctacttcttcaagtactgtagatgtggctttaaattcacttgtcatattatcctcaaatccgcaactaagcccttgaacgtccttattgcgtttacacgtcctctcattactgaatttgcagataatttgaacttgaagcacccacttctgcctacaatatccccttaccccacaatgtgacttgaggcaatacacaatatcattcccataagttgtaggcattatccaaaatcagtctggaaaacatctgcgtaagcattattacaggtatagatgttcagcacataccgccttgatgtcctgatccacttggctggtacagagataaacctgaagacaaacgcttttatgcgacttgttgcattgagcccgaacttctttacgtcaagtctttgaataatggccttgtaaaagttacggataagtgctgtaagaagaaggaacactgtgttctctgccatgaaggatttgggcaatctgtcccacccgaaaccattgttcatatcatcgaagatacgttcctttcctccacgaaggttatagaactcgacaatttctcttacggaagaatcatagtcgttagtcaggatacaacggtatgtgtattctccttcccaaaaatcctgcacaccatccatccgtttctgtctttgaatcacaagtcgatatgccttacctttccacttctcaacaaggatagagttcaattcaaactcaatgccattgatttcctcagttttccagcctttgagagcaaaggtgtcattgtagatcgaactgcagcggttagcacggatatagaaggacttgcagtgtttttctatttcctccacgatttcctcggaacatgatccacaatcagctctgaagcgattgatagtgagcccattctgttcaaatctcgcaaagaacctcttcagcgtgtccttctgatggaaacgaacatttgtgttaccatcgctattctctataccgactatcaaatcgccaataaccgccacgccagggcgataaccaaggaacttcttgtatgtaggctttgcatcatacttctctgtctctatgaactgatggtcgaaatcaacatcatacatctcaccctctttcagttggccagatgcaaatatacaattgagcaataaagtattgagagtgtcagccgtattgaaatcgtaggtcttgcccatatctgatgtgtatgaaatgttttcttgcgtcaactcctttatcgccctgaggatagtatcagagctacaagtgcgaagtgtcggatgaagcgagaggtggttcatcaaatgagtagtgacatcctcaatacatgaaccgctacagaagtagatactcatgagagaacggatgatttcgctgtactgataaccgaacgatctacaccttagaccgagggttgagtcgattacagatgataatgtggagtcaaattgctccatgattgaaaataatcccccaaaaggagtgagtctctcagatttaatttgtatcttcgccatgtctatcgtcggattctcttgttttttttgcaacactaagataagtgaaaattctgacatggcaaaatcctgagcaactttttgttgctcaggtacttaaaaagtttaatttataatagtgttgcggaattaagggtaaatatgtctcaatgaatgaaagaatagtcctatttttctattctgatacgcgcgtcaactgctacaacggccttttgcgttgccaagagcggatttatatccatttctttgatctctgtagcgaaacgtagcaaagtggacaaacggacaataatttcagcaaatttatcttcgttgactcccttttgcccacgtgttccctgaatgattttataagcacgcaaagaatgaatcattgaataagcttcttcgtaagaaagcggagccaaaccggaagatacatctttcagcacctccacaaaaatacctcccaaaccacaaagtaccacgtgaccgaacttctcttcatattttgcgccaacaaacagttccgtacctttcagcatcggctgtaccataattgctcttgcatcaggtatctgcatcatacgatcaaattccagtgccagatgttgctcacttttaatgttcagaacgacaccgccgacatctgatttgtgcacagggccaaccactttggcaactaccggaaatccgcaccgacgggcaaaagctactatctcctctttattatcggaaacaaattcatctaccaacggaataccggcagcgtgcaacaatgcctgtacataattgggagcgatataaccatcctccggaatagaatcaataatacgacgaatcctcggaacgtccactccgaacaattctatttcaggaactgccggtttaggagcattgacgatacgtgaaagggcagtacccaaggtcacttcgtctgcaaaattcacatgcccttttgccaggaaggcggaaacctccgctccggctgtattaatggaaggaagaatgggaaaaatcggtttcttgcaagtctgcatcttttcatgaagcacatcatacatttcaaacatagtaaccaatcccggagttccgaagatagccatcatggcgtctatattatcaagcttttcctcgcagtagtcaatgcaaaggcgcagatgttccggtgttccggtagccagaatatcaataggattcccaacggcagcaccggggaatagttgggcttttagttcctcggctacttctccctccagcttaggcacattcagtccgcctttactcaaggcatctgtcagcatcactcccgggcctccggcatgagtgataatggcaaaattctttcctttcaattcgggtaaagtaaacacgcaacctacggtagtcaattcctcacgagagaaacagcgcacaatccctgctttacggaacaaagcctctactgccgaatcggaactggcgattgctcctgtatgggaagatgccgcccggcttccgctctccgaacttccggctttgattgccgcaatcttgcacccttttctaatcaaagacgaagcatggaataacaacctgtccggattctgaatactttcaatatagagtagtttcagatgagaatctttttcgggatcgaagttctcatccataaattgcaatacatcttccacgccgatctgcttggcatttcccaccgaccagactgaattgaactgcaaaccttttgttacggcactttcgagaataaataccgccgtagcaccggagctagaaatcaagtccacccctttggggtttaagttaggaatcggctggctgaacacgctatgatgccatgtattcatcaatccgatgcaattaggaccaatcagcgaagcaccgtatttattgactgtttccaaaatacgttcttccaacagtgctccttcgtgagtttcttcaccaaaacctgccgagagtatgataaatgccctggtttgtttcttgctagccaatgtttccaccatatcaggacacatcgaggcaggcacagccaacaccgccagatctgtgtccggcagatcattcacgtccgcaaaggcgggaactccctgtacttccttttccttcggattcaccgcccgaagttctccccgataacctccatttatcaaattctttaatattgcgccacccggcttatgcacattattcgatgcccctactacgacaatgctttcaggacgaagcaactgggttgttatcatatcatgctttggttttcgtttaacttaggtacaaatatattctttcttacgagaaaaaagaaagaaaaaggggagaaatatagatggaaatagatgataaaagaggaaatgagcaagaaattatatagattatactgacttattgaaatgcaaagctataatcttaccatgtaattcttatcattagaacagaatattactttatgcagaaaaaatggacataaaactcatacagaatcaaaaatatacaagatgagtccggagtatattggaaaacttgaaggataagcaagttgcataatccatattcacacaaaacagactttaaatcattcgattcaacatcaaaaaggcaaaattcctaatttcaggagcagattattgcaaatataagttcaaatagaaacaactcacatgttacctattcgacagcaaccagcacaaaacaagtattctaaatgcccttttgtcctttcgtttaaaagcaagaaagtacttctcactgaccaataaaccgtttctttaaaaggaacgaagtcttcctttaaaagcaatgattcatgattctatcaacaatcatgaatattcactcatttgtattcaagaaagattacttattccgcatattcatacagtattttatacgtcacttcttttattagaatacaatttagatactcctaatctgtttcaatcttaaaaatagaacataatagaaaatataaaaataccccgatacaaattcgctattttctagccaacttatatcagggtaaaacactttctttttacctgtttttttattacgaaacgttcctgtttcattctgtgaccacttttcaatgaaataatctgtgttaatccgtgtaatctgtggtgaaaagtcattatctttgcacattgcaaagttgaaaacaacaaaaatcacactatataatggaaaagaaattcaaaagaaccaccgtcacatcggcactgccgtatgcgaacggtcctgtccatatcggtcacctggcgggtgtatacgtgccggcagatatctatgtacgctatctgcgtctgaaaaaagaagatgtattattcatcggaggttcggacgaacacggagtgcctatcaccatccgtgccaagaaagaaggaattactccacaggatgtagtagaccgttatcattcgctgattaaggaatcattcaaagagttcggtatctcattcgacgtgtatagtcgcaccacttcaccgacgcatcaccaactggcttcggatttcttcaaaacattatacaataaaggagaattcatcgaaaaaacatccgaacaatattacgacgaggaagcaaaaacattccttgccgaccgttatatcaccggagaatgtcctcactgccattcggaaggcgcttacggcgaccaatgcgaaaagtgcggaacctcactttctcctacagatcttatcaacccgaaaagcgccatcagcggtagcaaaccggtaatgaaagaaaccaaacactggtatcttcctctcgacaaacacgaagcatggctgcgcaaatggattctggaagatcacaaagaatggcgtccgaacgtatacggtcaatgcaaaagctggctcgacatgggtctgcaaccacgtgccgtgagccgtgaccttgattggggtatccctgttcccgtagaaggagcagaaggaaaagtgctctatgtatggtttgacgctccgatcggatacatctccaacaccaaagaacttcttcccgacagctgggaaacatggtggaaagatccagaaacgcgtctgattcacttcatcggaaaagataatatcgtattccattgcatcgtattccctgccatgctgaaagcagaaggcagctatatcctgccggacaacgtgccgagcaacgaattcctcaacctcgaaggagacaagatctctacttcccgcaattgggccgtatggttgcacgaatatctggctgatttccccggaaagcaagacgtactccgctacgtactgaccgccaacgcaccggaaacgaaagacaacgacttcacttggaaagacttccaagcacgcaataacaacgaactggtagccgtatacggcaacttcgtaaaccgtgcaatggtgctgactcaaaaatacttcgacggtcgcgtacccgcacagggcagcttaaccgactacgacaaggaaacgctgaaagaattcgcagacgtgaaagcagaagtagaaaaactgctcgacgtattcaaattccgcgatgcacagaaagaggccatgaatctggcacgtatcggaaacaaatacctggccgacaccgaaccgtggaaactggctaagacagatatggaacgtgtaggaaccatcctcaacatttccctgcaactggttgccaaccttgccatcgccttcgacccattcttgccgttcagctcggaaaaactccgcaaaatgctgaacatggatactttcgaatggtctgaactgggaaaagataacctgcttcctgtaggccatcagttaaacaaaccggagttattgttcgagaagatcgaagacgctactatcgaagcacaggtacaaaagctgctcgatacaaagaaggcaaatgaagaagccaactacaaagctaatcctatccgcccgaacatcgaattcgacgacttcacgaaactggatatccgtgtaggtaccattcttgaatgtcagaaagtaccgaaagcggataaattgctgcaattcaaaatcgatgacggactggagacacgtaccatcgtatcaggtattgccaagcattatcaaccggaagagctggtaggcaaacaagtttgcttcatcgctaatctcgctccgcgcaaactgaaaggaatcgtcagcgaaggcatgattcttagtgccgaaaacaacgacggcagtctggcagttatcatgccgggacgtgaagtgaagccgggcagcgaagtaaaataataaaactagaatagggaatacatgaaaagctatcatcacgcatagccttttcatgtattctttgcaaataacatgagcgagaatcagtcactaaaagaaaagacagccaaaggactattttggggaggattcagcaacggcatacagcagttgctaaacctacttttcggaatattcctcgcgcgattactcactccgtcagattatggaatggtgggaatgttggccatcttctccctcattgccagctcgatacaagaaagtggtttcacagctgcccttgttaataagaaagaagtgacgcacaatgattacaatgccgtattctggttcaacgcggccatcagtctgtcgctgtacctgctgttattcctctgtgcaccgcttatcgctgacttctacgatactcccgaactgacaccactggcacgttattcttttatcggcttcttcattgccagtctgggaatatcccacagtgcctatctcctgcgtaatctgatggtcaaacagcgggcattgtcttcggttatcggactcaccgtgtccggaatcaccggagtcactcttgcctactttggtttctcttattggggaattgctacgcaaagcatcgtttacgtaaccatcaacacagcctgttactggcatttcacccgttggcgaccaagcttgcagttcaacttcaccccgattaaggaaatgttcggattcagtgggaaactactggttaccaatgtattcaatcacatcaataacaatctgttttccgtgatactgggtaaattctacagcgaaaaagaagtaggatattacaaccaagccaataaatggtgcggcatgggacaactcttcatctccggcatgataaacggagtagcgcaaccggtactcaccaaagtgtccgacgaccttgaacggcaaaaacgggtatttcgcaaaatgctgcgtttcaccgcttttgtctcgtttcccgccatgttgggattgggaatcgtatcggaagagctgattatcatcaccatcaccgacaagtggtattccagcatattaatcatgcaaatactgtgtatcagcggagcctttgctcccatcgcatacctctatcaacaactgattatcagtaaaggaaaatcccgcatctatatgtggaacaccatagcgctcggcataattctactgtcaggcgttctgttagtccactcacacggtatctatgccatgctcgccgtctatgtatccaccaatatactgtggctactgatatggcactactttgtatggcaggaaataggattgaagcttcgccatgccctgatggacatacttccttatgctgccattgcggctacggttatggtaatcacctattacaccacccgctccatcgagaatatttatctccgcctggcaagcaagatagtgcttgctgcagcactctacgtagcaaccatgtggggcagccgatcggttacttttaaagaaagcattcaatatttcatcaaaaagaagacacatgaacccaaatgaccttgccacccgataccatcttctgaatagttctttcaaaaagacgatgatttatcacataggtatagacgccggattctttaccgaatatacctatatgctccatgcaatgctctattgcctgcaacacaaaatacagttcaagctttactccgacgacgccaacttcggatgggaaaaaggttgggaagattgtttcgcccccttctgcgagcaagtgcacgaaccgtttcatcacacttataacacccatcgcctcccctcctggcaggcattgatgaaagacaaaaagctgcctaagacgaagttactgaaatggaaactgaaagtaacctgtaagaacatcatcggaaaaacgattgcctttttcacatacggcaaaccggtcttgctcaactttcaactgacattcaaccccaatcagcacttccatattcccgaactgggaatagacggcgactatctccataccttccaaaaactgacggaaatcacttggaaactcaacgacaccaccgcacaggaatgtcgccaatgtgccgccgacctgcaacttccaccccaatacgcaggatgccagatacggggaggagacaagatcaccgaaaccaacctgcttccaccggaacattacatacggcttattaaagaaaagaccgccctacgcgacgtctttgtattaacggacgattaccgccttttcgaacaagtacaaacccttgccccggacatacactggtacaccctttgcagccccgacgaaaaaggatacgtcaacagcgctttcacgcagaccaccaaagagctgaaacaaagacaaatggcacgtttcctttcctcgatacagatattgatggacgcctccgtctttataggaagcatcactaccggccccagcctgttcctattgaagaaattctatccggacatcaatccggcagactgtctgctcaaggactttccgcaagcatccgtccttcccataccgggacgcggacaagtggccaccgaatttatgcaaggaaacttaaagttatagtaacttagcaatataattactacttttgtagcacaacgtgcattaaccatttccgatgaacaagaaatatacagccgaagagcttgatttattacatgccgaactctacgacatattgggagaaaccatccgggtgtgtcagaagcacaacattccctattttgtgattggcggcacggcaatcggtgcactctacgaccaagcgattctcccctgggatgatgatattgacataggcatgacgcgggagaactacaacaaatttctgaaagtagctcccgaggaactgggtccttcctacttcctttcatggatagagacagaccctcatactccgtattattttgccaaagtcaagaaaaacgacaccctttttgtagaagaaatgttcaagaatgtcccgatgcatccgggcatttttgtcgatatattcccattcgacaaaattcccgacaacaagctgctgcgaagaatacaatccgaagcactcggcttcctcaaatgctgcctgatgggaaaagagatatggatgtggaaacacttcggtacatgtgaaatagagaaccccacgaaccggggagccttctcctgtttcctgaacagggtagtcgacctgcttttctctaaaaaagcaatctaccgcatgctggtgtcagttcaaagctgtttcaactcacgaaacacccgttactataacaacgtaatggccactgccgaccacgtaaccgtagaaagcatccgccacctgcaacccgtgaaattcggccctctcacagtgaccgcccccgacgacctggaaggatttttgcgttacaactatccaaccctgcatcgatttacagaagaagagcaggaaaaagtgaacaaccactatcctgccgccctgtcattcagtacaaccccaaaacaagaactatgaatatgaaatccgctttagtagacgtcccggtacttatcctgttcttcaaccgcccgcaacagttgtcgcaagtgttcgagcaagtgaagaaagcgcgtccgtcccgcctcttcctctatcaggacggagcacgaaacgaacgtgacctgcccggaatagaagcctgccgtgaaatcgtatcacagatagactgggaatgtgaagtagaacggctttatcaggaaaagaatttcggctgcgacccttcggagtacatttcgcagaaatgggccttttcgaaagtcgacaagtgcatcgtattggaagacgacgatgtgcccgccgtctcctttttccaattctgcaaggagatgctggataaatacgaatatgacacccgcatcagcatgattgccggatttaaccccgaagaaatcacccaagatatgccctatgactatttctttaccaccaccttctctatctggggatgggcaagctggaaacgggtagtcgaccaatgggatgagttctacaacttcctggacgacttcttcaatatgcaacaactggaacagcttatcaaggaacgcaaattccggagcgactttatctacatgtgccagcgtcaccgggaacagcagaaagccttttatgaaacgatcttccacgcctccatactgttcaactccgggctaagcatcgtgcctacccgcaacatgattaataacttgggagcaacggcagattccacccatttcgccggctcgattcataccctgcccaaaggttaccgccgcatcttcacgatgaagcgctatgaggtggattttccactgaaacatccccgctacgtcatcgaaaacgttgcctacaaagagagcgtttaccgcatcatgggctgggatcatccgtggatcaagatcggacgttcgttcgaagaactgttcctcaacctgaaatacggcaatttctccatcattacgaaagctgtcaaaaaccgaatcaacaaatggctgaaaagaaacaagcaccactaaataagttgcttactatttatttttaccatacccgcctcacacgggaaagctacgaggaatggaaagaatataaattccccggacacatcttatacggacttcctttactggagaattacggaatacactccgtgatgcacaaatgcaaatatttctccggccgtctgaaactcatgctttacgccaccaaagagattctcttctgcaaggagaaatacgacgtcctctacgccacctctttccggggtatagagcccgtcatcttcctccgtgcactgggactgtaccgcaagcccatcgtgatctggcatcatacggcagtcgtgaccaatcccaaaccgtggcgcgaacaaatctcccgccttttctacaaaggtatagaccaaatgttcctgttcagtcggaaactgattcaggactcgcagaaaacccggaaagcaccgtcccacaaactgaaactcatccattggggaccggatcttcctttctacgaccacctgcttgcagaaatgcccgaccggaagcccgaaggatttatctccaccggtaaagaaaaccgggacgtagacaccttgctccaggcatttgccgcaacgaacgagaaactggatttgtacattgccgtctcatgcggtaacatcaactataaaaagatcatcgacccgtatgcattgcccgactccattcgcatccattataccgacggagtgattccctacgaactggggaaactggtggcacgcaaaagttgcatcgtgatctgctgcctggacttcccctataccgtaggactgaccacgctcgtggaagcattcgccctcggcatccccgtcatctgttcgcgcaaccccaacttcgaaatagacatcgacaaggaaggaataggcatcaccgtagaatataacgacgtacaaggctggatagacgctatccgctacatcgccgaccaccccgaagaggcacggcgcatgggagagaatgcccgcaaactggcggaagaacgtttcaacctcgaaatcttttcacgcgaaatagcagaaagcttgctggaaatatcaaacatttcctctaaaaaccgtacatttgcataaacttttgcccatgagagtcctgattataaatacatctgaacgaataggaggagcagccatcgcagcaagccggttgatggagtcactgaaaaacaacggcatcaaagccaaaatgctggtacgtgacaaacagaccgaccaaatcagtgttgtccgcttaaaaagtaactggttgcaagtgtggaagttcatgtgggaacggattgtgatctggagtgccaaccgtttccggcgttaccatttgtttgacgtagacatcgccaacacaggtacagacatcacctcactcccggaattccgccaggccgacgtgatccatctgcattggatcaaccagggaatgctctcactgaacgatatacgaaagatactgacctccggcaaacccgtagtctggaccatgcacgatatgtggccatgcaccggcatctgccattacgcacgggagtgcaacaactatcagcaggaatgtcacgactgtccgtacatctacaaaggcgggggacgaaaggatttatcctatcgcacgttccgcaaaaaacagaagttatacagctacgctcccattcatttcgtcacgtgcagccattggctgaaggaacaagcccagaccagtgcattatttgaagggaaaagcgtgaccaatattccgaacgctattaataccaacttgttcaaacccatgaacaagaaggaagcgcgtgccaaattcatgttgccggaaggtaagaaactagttttgttcggctcattaaagatcaccgataaacgaaaaggggtcgactatctgattggggcatgcaaactgttagcagaaaagcatccggaatggaaagactcactgggtgtagtcgtattcggcaaccagtcgcagcagttacaggaacaacttcctttccatgtatacccgctcccttatatcaaaaatgagcatgaagtagtgaatatctacaatgccgtagacctcttcgccatcccgtctctggaagagaatcttcccaatatgattatggaagcaatggcctgtggagtgccttgtgtcggttttaatgtgggaggtatccccgaaatgatcgatcatctgcacaacggctacgtggcacaatacaaatcctcggaagattttgccaacggcatacattggatattgacggaaccggaatacaacgaactctctgcacaggcctgccgcaaggttctgggtaattattcggagagtatcgttgcaaagaaatatacagatgtctacaataaaataacggggaaatatgcatagtgtccatcctactcccaagttctctatcattacggtgacatacaatgctgaaaaggtattggaagacacgattcaaagtgtaatctcacaaacctatcatcatatagaatacattatcgtggatggagcttccaaggatggaaccctctctattatcaaccgctaccggtcacgcatacacaccgtcgtcagcgaacccgacaaaggactgtatgacgccatgaataagggcatcgcccttgccagcggtgattatctctgtttcctgaacgcgggcgactgttttcacgaggacgacacactgcaacaaatggtgcataccatcaacggcagcgaactgcccgatgtgctttacggagaaaccgctatcgtagaccaggacaggcatttcctgcggatgcgcagattgtccgctcccgaaacgcttacctggaaaagtttcaaacagggtatgttagtctgccatcaggcattctttccccgtcatacgctggtagagccctacaacttgaaatatcgtttttctgccgatttcgactggtgcatccgtattatgaagaaagcgcgcaccttacacaatacccatctgacgattatcgattatctggatgaaggaatgactacccgcaatcagaaagcctccctgaaagagagatttcgcatcatggcaaagcactacgggttgattggcaccgtagcacatcatatatggtttgtgatccgtgcggtgattcaccggtaaagctggttctctttaaaatgttgcaggcaacgcaagcaactggtacatcagcgtacgtgccatacgtatctgcccctttgtactaggatgtaaacggtcatatcctgcgtcgtagaagtaaatcagttgctcttccaccatcgggttcagcccggttaccgcattaaaatcaattacgggcactccccacacattaccggcttccttgacggcctgcacgtaggcatccacatattcaccacaactattctgatagttttcatccggttgcacgttcttctctccaaaatccgccagtgagcggtgcaacggggttaatagtacaatctgcttatccggaaacagttgtttcagcctgtggattccgatgttgatacgtcctttatacgtgtttccatccattataggcgtacgtttcttgcgggtttccagctttttgacctgtccgcgggctgccatcacctgttcttctgtttccgtaaaccactctccgataggcacaccgtcattaaaatcattcgtacccatcagaatcaagatagcatccacttctccaccgtgttcctgctttagtttctcggcctgacggggcacatcattccattgtctgccgctgataccatatacataaggagtaatccccagccattcctgcaggaaatcccagtatttctttattttgtcaccatagcagttgggatctgtaatagagtctcctaaatatcccactctttttccttgccacggatgccggacagctccattattcgtttcagcagagtttgcaactttagatgtttgattctgtccgcacagaaaagaggaacagaaaaacagaatggtacatgcgagtaataatttgcttttcatcggtattatacattaaatgagagatttgtatctaatatcctgcaaatgtaattcaaaaataggtagtttcaatcaatttgggcagtcaatctcatccatacaaccggacagacaaacgggtctctatttgacgattcttgctaaaatgcaggtttacagtattttttcatcaaagttatcattgagttttacacctaaaatcctatctttgtcacaaactaaaagaaaaattggatgtttaactcattttcattccataaggattccgttctgtaaataatctgtaagccttcctctcattacagattatcccttatgttttctgacatattcttgtcagagttattttctatatctaaattttaaactatttgtatggtcaaatggtcacaagcatcgtcacatgccttcatttaccgtactgctaaaacattaaaaaacaatgagtaacgaattaaaaacaatccacgaattcgattttacactgatatgtaattacttcaaaggactaaaacgtcaaggtccgggaagccctgaagtcacacaaaaagccttaagtttcaccaacgaactgtctgacaatgccagaatagccgatattggctgtggcacaggcgggcagacaatggcattagccaactatacgaaagggcaaattacaggcatcgatcttttccccgacttcatcgaaatattcaacagaaatgcaatagaagcccattgcgaagacagagtaaaaggcattgtcggttctatggacgctttgccgtttcaagaggaagaactcgatctgatctggtccgaaggagctatctataatataggattcgaacgcggcatgaatgaatggaataagttcctgaaaaagaacggattcatcgctgtaacggaagcatcctggttcaccccggaacgcccctccgaaatagacgacttctggatggctaattacccggaaatcgatacgattccgagaaaaatagcacaaatggagaaagccggatatatcccgacagcccatttcatcttaccggaaaattgctggaccgagcatttctatgctccccaattcccggttcaggaagcctttctgaaggaatatgcaggaaatgaagctgccgcagacctcatcgccggtcaacgacacgaagagagcctatataataagtataaggaatactacggctatgtattctatataggacaaaaaagataattgactatctgccggagaagttagcaagataggataactctccggcatttattatcctttattttgcagaagatatggaaacgaaagatataaataaggaagaatatcagttacggatcaacaaagtgaccgactatatccatcaaaacattgaccagccgttatcattacagaaaatggcgggtatcgcatgcttttctcctttccacttccaccgcgtatttacaatcctgaccggcgaaacgcctacggattatatcaaacgcacccggattgaaaaagcagccctattattaaaacaaaacaaggaactttccgccaccgaaattgccgccctttgcggctttagcagcctttcgctgttaagtcgcaatttcaggctgcatttcagtatgacgatccgggagttccgctcactaaaataaaacgctaaagaatatggaaaaagaaaataagattctgatttttcgaacttctatcaccaaaagatgtgacatcaaacgcataggaaaacttttggcagagttccctcaaatagacaaatggaatgtggactttgaggactgggagaaaatattaagaatcgagtgcagtggtatcactgcactcgaaatatcggaagtactccggaataatcatatttttgccagcgaactggaataaaacggagggaaagaagtctcaaactcccaacaattgtttcaattcacccattccttcagaagctcccttctgaattacatgtatcgaacgggaagtatgcgtatctaccggtttcggatcaatcagatacacctctgctcctctcggtacataatgaagcagccccgccgcaggatatacattaagcgatgtaccgataatgacgaaaatatccgctttctccacatagcggatagctgtttcaatttccggcacagcttctccaaaccatacaatgaaaggtcgtaattgagtgccgtcaccggccttgtctcccatcttcacttcatattcttccggtttcagctcttttataaattgaggattatatggatctctgctggaacatacttttgtcagttcgccatgcagatgaataatgtggctacttccggcgcgttcatgcagattatcaacattctgtgtcaccaccgttacatggaaacttttctccagttccgccaacaactcatgtccacggttcggtttcacctccaacaactgtttccggcgttcattatagaaattaatcaccagagccgggtcccgctgataaccttcaggagtagccacctgctccacaggatatttatcccacaaaccgcccgcatcccgaaatgtactgatcccactctcggcactcataccggcacccgtcaaaactaccagatttttcattactattcctccttctttttttaatagccacacaaatgtaatcagaatcatcgaataaaagaagactttcttacgcttaatctaacctgatatatacgaaactttaagatgaaagatacagatagttagtgtcagacatactaagatttattcgtctgactatagttatatttacatctgactatagttattctttcgtctgactatagttagacgaaaagtaaactatagtcagacgattaattatctgcataaacaaacctaaataatcagaataagccgattaaatcctacgaacaaaaaactaattctttaaagaaaagcgattaactttcacagatataagaatttttaaatagcaaatgctaaatcattcaaataaaacacgtacttttgcgtttcataaatttgcaattgattgaaagctaaaaccatgaaggtgatacatttcaatcgccaacaaaaaacattatatggataaattcagttactctattggcctcggaattggtcaaaacttatcaagcatgggaatcggaaaccttgcggtagatgatttcgcacaagcaatcaaagatgtattagaaggtaatcagacggctatcagccacaatgaagcccgcgaaatagtgaacaaatatttcgaagaattggaatctaagatgggtgccgttgctattgagcagggacaggcattcctcgaagaaaacaaaaaaggaccgggcgtagttgtccttcccagcggactacaatatgaaatcatcaaagaaggtacaggtaaaaagccgaaagctaccgatcaggtaagatgccactatgaaggtacattgatcgacggtacactgttcgacagctctatccaacgcggagaaccggctgtattcggcgtcaaccaagtaatcccgggatgggtggaagctttgcagctgatgccggaaggttccaaatggaaactgtatattccgtcagaactcgcttatggcgcaagaggtgccggagaaatgattcctcctcacagcacactcatttttgaagtagaattactcgaagtattataaataaaaaatttcaaagcaaaatgaaaaaagttagtatttttatggcaatcgccgctgcagcaagccttgcttcttgtacagctcaagctcctaaagcaaatctgaaaacagacatcgactcactgtcgtattctatcggtatggctcagactcaaggtctgaaaggctatctgacaggtcgtctggatgttgatactacttacatggcagaattcatcaaaggtttgaacgaaggcgcaaacaagactagcaaaaaagacatcgcttacatggcaggtctgcaaatcggtcagcaaatcagcaaccagatgatgaaaggtatcaaccaagaattgtttggtacagactctactaaaactatcagcaaagaaaacttcatggcaggtttcatcgcaggtactttggaaaaaggcggcgtaatgactatggaagcagctcaagaatatactcgtacagctatggaaactatcaaagcaaaagctttggaagaaaaatatgctgactataaagctgaaaacgaaaaattccttgctgaaaacaagactaaagacggcgtaaaaacaactgcaagcggtctgcaatacaaagtaatcactgaaggtaaaggtgaaattcctgctgacacttgcaaagtgaaagtgaactacaaaggtactttgatcgacggaacagaattcgacagctcttacaaacgtaacgaaccgtctactttccgtgctaaccaagtaatcaaaggttggacagaagcattgactatgatgcctgtaggttctaaatgggaactttatatcccgcaagaacttgcttacggtgcaagagaatctggcaaccaaatcaaaccgttctctactttgattttcgaagttgaactgttgggcatcgaaaaagataagaaataagaaagttcttttctaaatagaaaaaggaaagaggtgcaaaacgtttgtgcctcttttttttgctttttcctatttttttctccgaaaagaagaataattaaaataaatctctatatttgcttactatttgataacaacaggaaattacaatttattattatggaaagaatagacaacctcgacaggcagatcctagagattatctcccagaatgcccgcatcccttttaaagacgtagcagccgaatgtggagtgtcacgcgcagctatccatcagcgtgtgcaaagactgattgacctaggtgtcattgtaggctctggttaccatgtgaacccgaaatcattgggatacagaacttgtacctacgtgggtatcaaactggaaaaaggctccatgtacaaatctgtcgtagcggaactacaaaagattcccgaaattgtggaatgtcatttcactacaggtccgtacacaatgctgacaaagctttatgcatgcgacaacgaacatctgatggatttgctgaataacaaaatgcaagaaataccgggtgtggtagctaccgagacattgatttctctggaacagagtatcaagaaagaaatccccatccgcgttgaaaaataattgtgatggaatttctaaatgaatatcaccttgcggggttattcatcggaatatgtacctttttgattatcggcctttttcaccccgtcgtggtaaaggccgaatactattggggtacaaaatgctggtggatattcctggtactcggcatagccggtgtggtcgcctcattaagcatcgataatgtgattttatcttctttgcttggcgtgtttgcattttcttccttctggacgattaaagaggtcttcgaacaggaagaacgggtacaaaaaggatggttccccaagaacccgaagcgcaaatataagttctaaaaataaagtatcgtagttttttatcaaaaggatttgcataattcgagggaaaatactacttttgtcaccgcatccaacaaaggatacatcggacttgtagctcagttggttagagcaacagactcataatctggaggtccctggttcaagcccaggctggtccactttagaaatcagcgacttacgtttgtgcgtaaatcgctgattttcgttttgcgaaaacaatgcgaaaacaaaaggtttgagtttcacattattacaaatagaatattagttaatctctgtgatattttatttgttattgggtagaatttgatgttattcaagtccaagtcgcttttctaattcttgaatgtgatcattcactctgcgttttcgtgtatcttccgaaacaaatttatcacaatatacttttatgttgccacaaacagaaaagcaaacagatgaaatgaagagtgttattggttttaccaattcttgcttttcttcataaacagctcttttcgttgcgtgtgacaattctccgcgataacaatacattatgtcaataagagaatcaaaattcagttctttgtgtttatcggtgcattcctgtttaatctctaaatacaaatcatagttccgctctttaatcatgcttattgtcgataatacagcatatttaagcatgttagatttcttaaaattctgtttttgctctccagaaaatttaccctttgcaaaacaatattctaaaatcatgtaaaaatgaatataagcagaaatataatctagtttgtctagatagctattagcttctcgaaagaaattatatggaactttggcttctggtataaatgttttatcaagcattagtttagagaaattgtcactagtaattaatatctttttctgtttgtttaatgattttctcatagaaaacaataactcgtttttagccttgtctgtccatgataagtctaagtattcattataatagactttcattatgccatgttgaaatccaccataaacttctatattacgaaatatatcaagcatcctactgtcaaggtatttgtccacattcatggtaaatgatttgttttctccatttttagacaattcgactaaatctgaatgctcaatactaatctctttggaaacagataacatgtacattccgccctcaagatataaactaattttatgtaaacaatataatatctgtactggctctttcagtgcaaagtttccatcaataattgttttggcagtaaatataatattcatatagcctatctgatttaaatattcgagtgtaaagttaataaatttatttccaaacaataacgaaaatgaaaaataatcattatttttgcaatcaaaagatgcaataatggaagacgtaaacagaattaaactcgttttagtagagaaaaaacgtaccagcaaatggctttcagaacaaatgggggttaatccatcaactgtgtcaaaatggtgtacaaacacatcgcagccagatataaccagtttgctaaggattgcagatttgttggaagtagatattaaagaattgatagttcgcgagtataaatcatatatattgtctcaaaaggcatgaagcagttttctgaagcgactcgggtacagatgcctgcaatggttcatcttacccgaataggatatacttactttggtaagctgagtgaagataagaacggcacagtctatgacggtgacacgaatattcttttacctgtttttgagcaacagttcaaaaaactgaaccctggtcatgagggtgaatggatgcaagtgctgaaagacatccgcaaagaactgaacgatgatgaccttggacgtggcttttacaaccgccttaaagtcgtatctcctgtaaaactgattgactttgacaatatcgaaaacaatactttccattttacagctgagtttacttgcaagaatggtcaggatgagttccggccagacatcaccctgtttgtaaacggactgccgctttgcttcgtagaagtaaagaaaccaaataatcatggtggtatgctggcagaaagcgcacggatgaacaaagagcgtttcccgaataagaagttccgtcgcttcatcaatataacccaactgatgattttcagtaataatatggaatacgatgcgttgggtggtatcgtacccatacaaggggctttctattgtacaggcgcacgcacttattctccattcaattgctttcgtgaggaaaacccaagcggccagaaaattgctccataccatcatgattatccatataaggagattgacagggtagcggaaaagaaaatactgtctgattacaactgtcaggtaatccataccagtcccgaatatcaaacgaacctcgatttcaatacgcccaccaaccgtatattgacttccatgtgttcgccagaacgcttattgtatatcattagatatggtatcgcttacgtccgcatggagcgagaggtggacggcaagattgaatctaccgaccaaaagcatatcatgcgttaccagcaattgtttgcatcattggctattcgtaagaaacttgccgagggaataaaatcaggagttgtttggcatacacaaggtagtggaaagacagctttgtcttattatctgacctatattctcaatgacttctattctaagcagaacaaggtcgccaaattctatttcattgttgaccgccttgatttattggagcaagccacacaggaatttgaagcccgtggactggtggtttcaactgctaacacaagggcggaactgatggagcagttccgcagcaaccaagcactacaaggaacaagcggccaagctgaaattacagtcgtgaatatacaacgctttgcagaggataaggaaaaagtacgcatcaatgactatgctacaaatctgcaacgtatcttcattctcgatgaagcacaccgtggctataaacccggtggatgttttcttgccaacctttttgatgcggacactgattcgataaagatagctctcacgggtactccgctgttaaaagaggaacgtgcaagttgcaaggtcttcggcacttacctgcatacctattattatgacaagtccattgcagacggttatacgctgaaaatcattcgtgaggatatagaaacatcctacaaagagcgactttcggacgtgtacgacaagctggacacattggtgcaaaagaaagacatccgcaaatcggaaatcatagagcaccccagctatgtgaacgagctggctcactatatcatgcaggacttgaaagagttccgtaagatacaaggagacgatacattaggcggtatggtcatctgcgaaaccagtgaacaagcaagacggctttatgatgtattccaagaggagtggcagaaataccaaccaaagcctatcaagattaagctccctgacgggacgtttgtggtaggtgaacccgaagtggattacaaatcaaagtatagaccactgaaagccggaatcattctccacgacacagacgacaaggaaacgagaaaacagacagtcaaggatttcaaaaagaatatgaccgtagatattcttattgtcttcaacatgctattgactggttttgatgcacctcgtttgaagcgtttgtatttcggtcgtaagctgaaagaccataatctacttcaagctattacccgtgtaaatcgtccatatccgggaatgcgttacggatttgtcattgactttgccgacattaaacgtaacttcaaagaaacaaacgaggcttatctgcaagagttgaatcgttttaacgatgtggaagagactggtgacggcaatgccacagacactttcactcaagtgattgaggacaaggacgagattgtggcacaaatgaaaaaagtacgccagaccctcttcgattattcctacgataatgcggaagagttttcttcggagatttccacggaagaagacaaggctgttctgcttgacctaaaacaggctttggaatctgcgaaaaatatggcaaacctcgtgcgtactttcggcgatgaggacatgaaggaacaattcgctaaacttgaaatcacgaagttgcctcagttgctttccgaagtacaaaggcgtattggcatcatcaaccaaaaggaagcttttagcatcggtgatgaaacaaagacactaatcaatgaggcgatgatggatatagagttcaccttctctaagattggacaggaagaaatgcgccttatttcgggtggagcggagctgaaagagaaatggcaacgcaccattgcctcgtttacccagaacttcgaccaagacgatcctgaatttatgtcgctgcgtgatgcttttatggaacgcttcaaggagcatggctttgtgattgacagcatagccaagttcaacgaagagactcaggctttggatgaaatcataacccgtttgcaggacttgcaaaaacgaaataatgctttggtaaagaaatataaaggggatgagaagtttgcccgagtacacaagcgcatccgtgaggtcaacaaacaaagagaagagaaagggcagaagccgatgttctcattccttgatgatgagattgtagccattctcaatattatcaaagaggatgtggatgccaaagtatatgaccgtaacgatattttgaaaaaagatgcatacttcgggcgcacggtaatggctcttatcaatgggtgcttgtatcattttccacaaataaggccggaaatggacgattataagttcatccagcaacgaatttcacaacaatatatcaaccaatacaatgccacatacggcatggcttaaaaagaaggaattatgtcagatataaaagaaaaaacattaaagctcattgacggactgaaagcgacatgccagtcttacggtatgggcaacgatggcaacgaatataagataatcactcaggtgtttctctataaattcttgaacgacaagtttggctatgagttgaaaaacaccaaaagcgatattgccaagaaactgataggggatgtgaaatgggaaacggcatacgagaacctttcggatgatgagcgtatgcttatccaaagtgccatttcgcccgatgttcctatgcttgagccttatcacctgatagctaacctttggaaccagcaaagtaaaggggatttcgatacaatcttcgattccacgatgacagacattgcggagcaaaatgcggatattttctctacgcaaacaactgccaacacaaagattcctttgtttgaggctttaacaccgtttgtgactgacacggcacaacgtgcgccattcgctcgtgctttggtggacaagcttgtgaacttctcttttgaagaggcatttgctcaaaactacgatttcttctccagtatatttgagtacctgataaaggactacaatacagccggaggtggtaagtacgcggaatactatactcctcatgctattgccacgattatggcccgtcttttggtgggtgacaatgctgaccttcatagtatggaatgttatgatccatcagcaggaacaggaacccttcttatggcacttagtcaccagattggtgaagaccgttgtaccatcttctcgcaagatatttctcaacgaagcaacaagatgctgaagctgaatctgctgcttaatgggcttgtctcttcacttgacaatgctattcaaggtgatacccttgttaatccttatcataagagcgatggcggacagcaactgcgccaattcgactttgttgtcagcaatccgcccttcaagatggatttctcagatacaagagaaaagatagctgccatgcctgcacgtttctgggcaggagtgcctaatgtgcctgctaagaaaaaagaatcaatggcaatctatacttgctttatccagcatgttatcaactcgctgaaaaagacaggcaagggtgcgattgttatcccaaccggatttatcacagctaaaagtggtattgagaacaagatacttcataaaatagtagatgataagattgtatatggctgtgtttccatgccaagcaatgtatttgccaatacgggtacgaatgtaagtgtgttattcttcgacaagtcggcaaccacagataaggtaattctgattgatgccagcaaattgggtgaggaatacaaggatgccaacggattgaagaaagtacgtctaaacgatgaggagatagaaaagattgtcggcacattccaacgcaaggaggccgtagatgatttttctgtagccgttacctacgatgagattaaggaaaaaggatattcgctctcagccggacaatatttcgacatcaagattgattatgtagatattaccgaggaggaatttaaccaacgtatggctaactataagcaaaccctttccgaacaatttgcagaaagccatcggttggaagaagaaatcatgaaacagttgaatgctttgcaattcaacgtaaatgtaggcgacaatgagtaaaggattgaccatcatagacaaggactatacccagtgggtagaaaatcttagtgtgcgttatcggcaaagtcaaatcaaagccgccgtaagagtaaaccgagaattgctcaagtattattgggaacttggtcgagacatagaagaaatgcacgttgaagagcgttggggacagagtgtcattaagaatctctctgtggatttacaactcaagaatccgaattcaacggggctttctcgtactaacatctattatgcaaaaaaattctatttgctttattctcaacacctaaaggttgtcccacaaactgtgggacaattagaggatgaaaatgggccacaatctgcggaagactcttctgaagttgtcccacagcctgtgggacaattgaaagagatgcttttttcaataccttggggacaccatcgttatttgattgacagatatggaactgaaccagaaaaggctttcttttatgtaaaaaagacaatgaaagaggggtggagtcgtgatgtgcttctcaactttatggactcaggactatatgaacgagagggcaaggccctgacaaacttcacacgtacattgccagacgaggcaagcgacctcgcacaagaactgacgaaagacccttacaattttgcctttacaggaataacgaaaccctacaatgagcaaattctcaaagatgcattgctcgccaacatatcccaattcctgctggaactcggtacgggatttgcatacgttggcaaagaataccgacttcagataggacaaaaggaaaaatttattgacttgcttttctacaacataaatttatcatgctatgtggtaattgaggttaagattggtgagtttgattttcaagacttgggtcagttaagtggttatgtggttgcatgcaatcatatcctcaagaaagagggaagagataatcctacaatcggtttactcatctgtcgtcaaaaggattcattacttgcgcaatacgcattggagggaagtaatcttcctttaggaatatctgaatatgagttatctaaactctatcctaaaaaggtggatggaacaataccaacgattgaagagatagaagcaaaattgggcaataaagataaaagttgaaagaaaaatatgatagattatgataaaataaccgaatatatgaccactatgggattgaatgtgaatggtggttttcagttgtctgcatttgcgataaatgaaatgttaggcaatcattactctatatccgaaaaagacttgcacgatggtgtagaatggctaaaagctaagatgaaaaaagaagttgaagaaaatccatattggactacagagcataaagaagatgtaaaaaatggacaagaatactttttgaattgctttgaacatgaagccaaatcatatctaaaaaatcaaaatagattattatgattttgacgaaatataaattgggagaaatccttgatgttacaagaggtgcaagtctcagtggcgagtattacgccactgagggtgaatatatccgtctgacttgtggcaatttcgactatcagaacaactgttttaaggagaacaagtccaaggacaatctttattatgtcggagacttcaaatctgagtttctaatggaagagggagatattattacccctttgacagaacaggcaataggcttgcttggttctactgccattattcctgaaagcggcaaatacatacaaagtcaagatgtagcaaagattatctgcaaggaagacttgttagataaggatttcgcattttatctcatatcctccgccctcgttaagcaacagctaagtgctgctgcccaacagactaaaattcgtcacacttcacctgataaaatcaaggattgcacagtgtggattcccgaattatctgagcaaaaacgcatcggtaagttattgcgctccattgaccgcaagatagaacttaaccgagcgataaatcagaatttagaagcgatggtgaagcaactctacgactactggtttgtacagtttgactttcccaatgaagaaggcaaaccctacaagtcaagtggtggtgaaatggtctggaatgagaaactgaaacgagaaatacccaaaaggtggaaagatattacacttaatgcctttatagataagaataaaggtggagattggggatatgatacgtctaaagatggaacaatcaaagtaggctgtgtgcgtggagctgatattattaagctaaatgatgtgcccacaagacatattacatcgaaacactctgaccgacttttagaagatggtgacattgtgattgaaatttctggaggaagcccagtccaagcgacaggtagagtagctttgataacaaaaggagttatagaaagaaatggaggagctctggtctgctctaatttctgtcaatcatttagtatgaagaaacgagtgctttcagagtacttttattatctatggcaaagcctctatgataatgataatatgttcaattttgaaggtaaaacctctggtattaagaactttcaaacagatgtatttctggcaaatcattggtttgaagctcaagaacaactaattgagaaatttcatgctattgtttctcaatatcacttaatgattgataaaaatataattgagaataataacttgactaagcagcgagacgaactattaccacttttaatgaacggtcaagtgttggtaaattctgatttatccgacggttgagttcaattttcttgtccaatgcagagaatatttcgccaattcgctcttgattacgtaatggaatcattggaactggaaacgaattgagcacttcaacggataacgcatagcgttgtccgcttccagaagcattacaagcgaaatatttctttgcatagtcagtatgcagaagggcgtttaggtaacgtccatctaaaatatctttgtttggagtaatcagggcgcaatggtaccccaagataacatcatcaaaatcatcggcaatataagtgggaacaccaatgtcatcacgagtctcactatccttggttaaagctacttgacctttctttaattggaacttggaaatctcattgggacgggcagtcgcaaacataaagccatcatgctgagctgtggttatagcccagttataatagacatcaacaaagttgcaaagccggatttcttgttcgccgtcttttgttttcttgtcaaccccactaatttctacagtggcaatatctcccagtttctgtttatccatttgcatcctattttggatgcaaagttacacattttcaagcagaatccagcatgattacttatcccaagtatttcttatgggctaactttacattgttttggttcacaatggcataatgcaaggtagtatctatacgcacatgaccgagcagacgttgcacctgttcaatgggcatacctttgtcaatagccattgttgcaagtgtacgacgaaacttatgcggatgaaccttaggcatagaaagggactttcctaattcccggattcttacttctacaccgctaattgttaggcgagtatgaggtgagtggagggaaacgaataaagcaggattgtcatctgtgcgttcatcaaggtattgctgcaaatgtagtttagttcgggcattgaagtaaacaacacgttctttgttgcccttgccaaataccacgcactggcgttcatggaagtcaatatcttcacgattcaacttaaccaattcacccacacgaatgcccgtggaagaaagaatgtctataagggcaaggtctcgtttgttggtgcaactatcccgcagttgctccagctgctcgtcagaaagcacctccttaacaagcgaatctgtcttaaccttgtggatacgtctaacgggacttttggcaatataatcttcatcttccaaccatgcaaagaagctggagaagatgcgtctcatgttgtctatggtcactttactggattggtgctcttcctgataatcggatagataggctcgaatatctgatgttgttatatgacaaatcgctactgaaagcgtaagtaataatcgctcaatagtattacggtaatatgccaatgtcttctctgagcacccctctatcttctttgccgaaataaacgagcttagaagatgctcattctcttgcgcttgttgtttggaacaatcttctttttcgactatttctacattatgtaactctgatgcaagcacagttttaagccgtgccatttgtcggcagtccaagtcacgctgcatctccgcaactattgcctgaatgatgttttctttcataattctataaaaatgatgtattataatatagaatataagcaagagagacctgatagcctctcttgtgcatttttaattagtcttcgttccaatgcctttcacattcaggacagcaattgacactagattctgcatagaactcatgtccacaacattcacaaacgattctaaggaatctctttcgaataattctatacctcataatgtaattattaaaggtcatgtgggaatatgcccatgtatatatgaatagtaatttagcagcacaacgggttaaaaagagtcgataaatcagaatttagaggcttgataaattctggttgtatcctaaaggcatcggcatatacacgcatttggtaaagattgatgtgtgggttcagtttcttacgaacaaactgaattattttttctttctcttgctcatctatgttgacaccaaaatagatagactcaaagcattcgcctttcagtggcatatagtggcgtatctcacgccaatcccatatttcctttgtcagctttgcctgttgaggagtaaatgctgcatatattggacttggtttgggtatgactaatctaacctcctgctcatattcccattcctttgcttttgtctgccattgataactgaataaatcttttgtggtatgatatgcgttaggacgctctattatatcctgatattgaacatcaagaacaagcggttcaagatatattgtaccaaacattggtggaacagattccaacactttgtctatgtcaagtccaatacaaatacctttatggttataacaataatggctccacatgagtaatgaatcattgatttttgataaactacatagccatgtatcattacgcaaattgagtgcatcgttttcttctttctctatccaccattccttaggtatccatccttgaagtttagtattaggtacatttgagtagtcaattagttttggatgacaatcgaaaggatcgttcagttgagacgcattagtgaattggagattctggttaccaatcatgcactttgcgccaactatatctaaatatttgtagagtatgcgaggcatttttattctattgttatttgtccattcattaaaagtggtaaaagttcgtcacgctgcttgataaaatttgatatttcctcttgcaacttcactatctgcttaaagattggtgatataagttcctcaaatttatccgcaatatctttattatcaggtatggcgattgtgctttgttgtaaatggtcttgcgtaatatgtcccatcgttgttttccttgcttctgccattttcttgaatacatcgacataatccaaaagttgaaaatagtagaatgatttcgggaaatcatttgcagatgtaaccttaaagatgtgctgattaagtcctccaagcccataagcccagagcataacttccagtgatgccgaccatgaaaatagcacgtcaccattatacacctttactgattctggtatatttgacgttacctcttcagtgtcaacagaaataccatcgtgcatttctcgtatcttgatgacaggtaatggcacttcatcatcctttggtctgaatttctgacaagccaaaccatttgtaaaaacagcaatttcaaagaggttcccacaatgccagccaacaggaatgttgcgttttagcttctcattccacaccatttcgccaccgctcgacttatacggtttaccctcttcattaggaaagtcaaactgcacgaaccagtaatcgtagagctgctttgccatcgcctctaaattctgatttattggcatgcatcttatcctatatcttgatttcggtatacagaaacttaggcataatttcatttgccggcaatttgccgaaaagcaactattcggatgtatattattgagtatcagtgcgattttgctcacatttcatttgctggcaatttgccgataaacacaaaaaccacaataagtagactataacaggggcggaacaccgtccctgttagttgtatgttacataatatacaaccagccctaatcccaacgtataaacgagtaagaatatcaccaagcctctcatccaaaaatccgagaaccaaacgccttcattccgtctgaggattttacgcatgttggattcatgttcagtaataagtttcgattgttcggcacggtgatttgccaataccgaaatccaactttctacagaatggtctatcagttgcttaagctttgcaagttggtcaggggtaattgttgttttgaatttcgtgtctcgttcagctttcacaatggcattgcagatgccattgacaatattatcgcaactgccaactgccgctttgagcgcaccctcaatgtgacattcggcagcgatagctttctccaaatcctcattgaactttatcagcgtttcttttgcctctctgatttctacgagaagtttatcaatttcttgcttttctgactcaatttgttggttcatttcaaccttctccagcatgtcattgacatttataggcgatgtgcctcttgattttcctatacccatgttcttgtatttataaaaagtgaattatctgtgcagccctttcctgcgtttgcacatgctgtttgccattcgtgcgcaacggcgtgcccattcaagttcatcctcgtccttgtcttttccccaacctccagtgtcagaaccgccaccgccacttgaaacagctatactggtagcagcatccatatatcctgcaaagagtaaaagagccgtgtgttgtatctctttaatcttagctaacggatgagcttccttcaaagaacaatcttgccggatgatattgtcagcggcttcgggtatctctacatggtagctgtgatattcgtctgtcgcaatatcgtaatgctttataacaggcagtaaaataggagtcaaatctgctgtccgtgtttgttgaggaatagattttgttggctcggatttcctttcctgctgatgcagttttgcccaagtagcctctatctttgatggagtcagatttctcccgatacccaacacggatgatttataatttgagttaccccgtttgatggaataaccataaacttttcccttatcattttcttgtatgtgtactttgtaacctcgttttgtcagttccatttcatattgtcgccaactgaatttgtccattgtacgaagtatctccatacaacagtttgagatttcctgcttgtgccgtatacctatttcttcagactgcacccagccacgtctctcgttgatgatattcgcagccatgactgccctctcaccaatcttatggctatcatttattttcccattcatatccacacggttggcatcaatgtgcaggtgtagaatgccacttttagaatcacgatgcagggcggctatgtactgcgaacctttgagattggtttgttttgaggaagcccgtttggtcttttgggaaaggtctatggaatcgaatacccggatgaactcatctgccaaacgagcccagtcatccattgtccagtttcggctctctttttcggacggggaaatttcaattcttatcacgtttctgccaagaggtctgcccttgttgattttctcggtaaacatcttctgcacgagcatcatccgaccgtacatcgcttccggtgaaatatcatcgggcaacaggttggctttgactatatccgctctgtctttattgacggaatatcttatggcatttgcaccatgtggaatggtactggcttttgctatcataataggtaaggatttttattctgttaggtaattctttatctggccccagcggttaataagctgtgtagctgctatcatccatcgctctacaaagcgtgtgtcgcggaagtatatggctcgtttgtccgcttggatggatttcacggctgccgtaatacggataaggtcgccccttgcatccgtcagactgcataaggcttctacctcacgctcagacaaccgttgccgtggatgctgccctaaagcagtgcggcgcacatagttgctcatggataaaccgcaggtcttggcaagttctttcgctttggcgtattcctgttccgttactctggcttcaagtcgcagggtacgctttataactttcttgtcattttcttcgtcagcttcattgttgatattctttttcttcatgttttgttatgttatgggtgagacatcaatctaaaaagggacagcagggtgggagcttgcgactgccggaatacgcctatgtagtacggatgagtgtaacgaatttgtgcgacataggaacttcttgcaagaccccgcacaaaatataggctctaccgccatatccaatatgattatgtctgaccatctgctgaaacatcctcgttagattcttcctctctcgcaggcggtggagaaaccgaagcagaagggaaagaaaaagaggacgagagtagttcccctttgtctgatataacaggtaatttgtcttcaaaggaaaaatcagtgtcagaaatacagccctcattcattacttctgattgactgtaatcattagaattggaaacgttttcctccagcgggggggggtggtaaaagaggcttcgcatcattggatagtgcgcctgtattctctccttcctcttgtcggtttttgattcgaacatagaaaggattgtctatgcgattgccattttccatccatgccgatatacatttcagcgtgtggacacttgttctgttgctttgcgcagatgcgacaattctcaactggttcatcttgtccaacacgcgggatatggttttcttgtcataatccaatttactggacaaatccacttccgaaaggatggcttgccccacttgtaaggttgtggaaaatccttttatggcataatcgttttcttccagcactgccgcttcgataagttggtgcagaattttcatgcggtcaatgccatacttgctccctgccagatatgcaagttgctctgacgaaagcactatacaataattcaagtttgttttcatcgtctgtcaattttgaagatggtttataaatggtgcagccaaaagagaaagtcagcggtgcataccgtaacctctctccggcatataatactccttgtcgtatgcaatgtggtcaagcacatcttgaagcctgtcaagttgacggctgtctaatatacggatggcggcaatggtaatgttctgtgaagcgatacggcggtgttcacaattccgttctgatgtacttccgtctccatcgacatggacacttcgcaggtaattattcaccgtctcggtctgttccttgcttggaaaggtggagggataacggtcttgaacatacgtaaccatgtggctgaccgcatttgccaacaacggggcacgttcttgtagttgtttgataagtttttcttttctcatattgtgatttatattgtcccgtatcccaagcatttttataactttctattttgtttgtttcctgtttttattctttttcgagggcaaaagggggacaaggggacattagttttttcttttcccttattttgaaattagaatggtaattccagttcacttggcagagttgcgcaggactcttcacttggagcgtccaccctcacccatgggtatttcgtccgtcccgtcttatcgcagtaggctggatgcagccccttgaccttctcctgttcactccgtttccaattgggaaacatggacatcaggcggttgatgtattgcgaagtgtatttggacggatttcgtctgactaaatcattgggcagttcctctataatctgccgggcacaaaccatattgagtgaggtcattgtggaatttggctctgagtatgctcctttctgataagccagtcgtgtcggaatcatccagcttgcatactgcatgggaacctcacgttccagatacatttcaatatcttccataatggggtcaacaatgatgttggaatgttgcatctgtatctcgttggcctctacctccatatcgggagccaagtataatttcataccttgcttataataggtatatgcctctgcccaaaattgaggaacggaacgttgcaaatcatccaaccaatctgacacatgaccgttgcctttgacagggattatccaccaacgacggtttccgttgtccccttgcaggaagtttgtctcattggtagtcgctgcaaagacattgtgccgcatgaactccaccaccttatgcccataagccggacgcatataatcactgcaacggcttagaaaagccttggctgcctctgcatcgttcgcccgtttcaaaccattcaactcactgatttcaataatccagccattggttatggtttccactttctccttgtcaccactggcaaaagagaatgaatcgttgaaccatctcccactgatggctttgaaaaaggtgcttttcccgataccttggggaccgggcaaggtcagtacgttgtcaaacttgcaacctggattgaatactcttgctacagccgccacgaaccaaagttttgtctgttccctgacaagcggattgtcctcggctccaagataatcgatgatggttgtggctatgcgaggttgtccgtcccatgtctcttgtgagatgaattcctgtactggattgaaactccgttcagaagaagtggtcttcagtatctcaaataccttattctgcgtcagacgtattctgtatgtcctttccagatagtcctgtatctttcctgctgattcttcatcaattttgttaccattgacattgcggaacaaagggcagaaacacacatcgtcctgacagaaggtatcgtaccttatctgactaagattctcatccagcgtaaaaataagccggagattgctgatggaacgagccggattcccgtaactgtctgttgccagattctttttccaattctcttccataccgctattctttgatatggatgtcacctgattcctttgccaaagacagtgcgaggtctgcatccactacgatttttcgtcctatctgtgtgatagctttgtctatgataccgcttttcttaatgcggtttgccgtgggtacactgcatccgaacacacgggcgattccctctatgccatagtagttgcctttggatgccacttggggagtggccgcttctgtactctccacacttttagtgatgagaaagcaaagctcctcacccgtcatcatggcgatgggcttttggagtagttggttaaaattgagtttttcttccatacctttacttgtttgatgattaaatactttaagcctcggctcaactctgtaaaaccgatttcgcaagcaaaggtagtgtatgaaactctgtgtgttggtcggtttatttataccttaatttaaccgaccgtattacaacagttgtttgcaaaataaatacggatagctggattccccaactacccgttattggcaaaatagtccgtccatcggtctattatccgttttgctttggtgtaactgcttcctctttggggtgagttcaaagtaagttccttgatttccccgtatcgcttctgcggtatatcgtgcccgtaatgccgttgtgagaactgttcgatggcacagtggaatgtcatgtatcttgtagacgcttttatcttgccagactttaccaatgatttcaacagataggcaagacttatatcctcggtattctcttcaagaaacaaacagattccttgcttgatgcgttctttgtcccctacaagaatatcatccaatgactgtattaccttcttgttcccacgtctgccttttatttttcgcaaggcaaatataacttccttccatatttcagggttacacatctctacagtatcttcccactccgctttggtttctgtgcccatctctatacttccattgacaagcatggtaacgcatgactttaccaaaagcatatcaccatggtcaacctcttcactattcagcagacggttaagcaactttgccatacgggacagaccgtggtcaaacacgacaaaataatacatgcaataagccaagtcttctttcttttccatcacacggtcatagaggttagccataaatccaccaataaacaccgcatgggagaggaaaacaatttgagagatataggtcaggaactgatagaccatttttctttccagtttactcaacagataaaaacctttgctgtttctcataagcaaatccaactgtacagtcaagtaggttctcatttccaatggcaggtgattccagatttcaataggcgtttcagaatgaaccatcagcagccctaacttcggagaagtaagcagttcaattgtccccgtttctacattgatacctatccacaatcgtttgtttgtgatacattgggcgatggtctcggtatattggccagcccattgtcggtttgcgatgtctggtacatccttcccgttggcaaaatctgaaagccaattgtacatcatcaaggcttcgggtggtgtgcagtcccgcatcatctggtacatgtccatcagaacagttataccacctttagccacagcatctatgcgcttacaaaagttggtatatacttcttcattgactgatttccatgcacggatagccatatcagcagtgtcctttctcttggaataggattttatcctttctatgaagtttctcattgtcttatggtattaaggttgtctgaacagtttgagcaattcttctgtggacatgcttacctgctttgccaacagagcatccctttcagaagtattacccaggtttagcagctttgaattgttctgcatctgtatgtcgagaggataatgctcgatgtagatttgagtaatggcatggtctgaagaagcatgtcccatgctctccgagatataatccatatccactccggcattatgcaggttggtggcaaacgagtgccggcaccatgtaccggacggacatattgacttgtcccaatttaatgcttcatggcatatcctaataatacggtcttttacgtttgagttttcctgcatggtatatttacggcgcaactcttctgtttccgcaccttttaatatatgaggaaaaacaaagccaccccgagtcggaggtgccgccacttcatctaacacatattgtaaaggagggataatgggaacgattacttcagaaccatcggcacttcttcgggaagttttctttcggttgaagcggaaagccttgccatctgtctgataataataactgtcgtaagtcaatcgccctgcatctgccatgttgaagccattgcacaggtactgggcaagaaacaatcccaatgagtagtgggcacgtttggtatattcttccgaccaatgttcgggatatttctttgagacaaaaaggttgtataactccgtcatttgacagacattcagaaagctctgtttgcgcttcgcactcttgggtatgctcacaagccctttttccttcttattagaaaaaggataaggaacatctttgagatagccttcatgtatgcacctgttccatacagcacggcaacaacggagataaatcccggcggtagtatcgctgattttcccgaccatcgccccattctcgtcttttactccattatgcataccgtctttccacttctgaatttctgcagcactgatgcagaatcctctaatcatattggttccgagaatttttctgaatgatttgagcgcgcactcgtagctctctgctgtggtaaaacgtgcaccaccatcatctgtccgtaattcgtggatgatttgctcccatacaccgacaaaggattgtgacttggtcgtatcttctttggatggcatcactccctcacccatgatacattggcgtaccatttcaaatgtcaggatgccacctttattcaggttcatcagaatttctttgtatttgggaataaaggtatctttccactctttttgaagtttataattatcgcttctactttttacggcattgcaaatatcggaaaattctttcgctgtataagagccaccgacagggtagtaaaatgctttgcgttctaatgtaaaacgaatagataggggatactcacttgacttcctcctattagttcgaatatcaagggcaagtgatacagtacaaccacgctccttgaaaagaggtaaagactttgtcaatttttccattgcattcaatagtttatgttctacataacctctgaatacagacgctttgcgatgtgaggtatacatacgcaaaacactgcatataaccacataattcttatccttaattggataaaaatattgttgttatatgcagcggtgcaatctcgttgtctcttgtcgctgactggtaaccgggcttatgctaatcggtctcaacccctagagcaactctcgcgtttcgttgatattaaagtatcctccgactggtacttcctctacgcttcgattcatcggaatggaataaccctcccacgatggttaggcaaactcacttttccatattgcaggaaagagcactctattgtcatggtttgccttatacatagtgcgacaaagttaatgaattatcttcatattttgaaataacagattggaaattgagtatcatagacactattaaacttttattcttttgaaataattgtcgtaaaattgaacagttgaaaatatttatgactaaatttacatccgattttattcacttaattttgaatgtcatggaaggaattgtatataggcacttaactcataaaaagaaaaaaaacggtgaggtttcttggattcttgccaaaatgaatctatatgactacattggcaatttaaaacggaatttctttgattatgatatccagcgtagaattgttcctaacctttatttggataagatttgggaaactgtattgcgcgatgattttataccttcaataacattaacaactaccgataaggcgatagaaactgatttttctaaagatgaaaatttaataaatttgagtcaatgtgagattattgatggtcttcagcgtacttatcgtctatggagtctgatatatctagaaaaagtattggagaaaattcaaagtaaaagtgctgatgagataattcagtttatcagagatgatgtaacttatggcggaaacaagttatttaatttaaaaattttaagcagaaagaatctaaagacccttttagaaaataatcatgctcttttggataaatatattgaagcttataggagttttgatatcatcattaatatatgggttaatcttagccaagaagaaattatacgtaaaatgcttactctaaatgcagggcaaaaaggagttacctctactcatcaattcgaacttctttttctccattttttcgaaagcctagaacttcctaaagacgtgcagctcctgagagaaaaggatccagactattttaaaatcaaaaacggtaatgaccgtaaaacaggccaatttcttatgagttctgtagtgattgctcttcaaagttatattcaggggaaaccgttacgaatttcacaagttaataagataaatattgatgattttaatattgatgagaatgatgctttccgatattttacaaaacagaacctcgaagattttgtgagattgatatatggaatagatcagaaattcttaagaaacaaggaacttgcgaattggttgatgaaggatactactctaagtggaattttttcagctttgggaaattgtaactccaagcaatcgaactttgacaataactcattagcttataaaaaattgaatgatttaacgcctgcaaatattgataaagttggatttgataaaagctataatcaattatcaagtgtaaaactaaatgtcggaaatgctgttagaaaagctgtatataattatttcctcaatatgtttgagggtaataaatcttattcatggtcacaagcatttaacaactactacgatgaagaggagtgatttatacagagcagtggctcgagatattgcagccaaagctaagaatgacaggcttattgacgatgatgaagaaaattctgtaaatgataatatcgttaattatgattctataggtaatttaggtactgtcgatatctttgatgatattaataaattaggtatctataaagaagtagccaaagttataaatttgtttgatggaactgacaatgctgatatagcatttggatcaaatatatattttggaaatgttgagcagaagaatgagccaaattatgtgaaagatgtttgtatttatgattcaacaaataaatttactgtgataacaagcgaaatgctttatggcgtttgtagaaatccaatcaatactactcaaattcgtaatatatttgaaagtatattaggagttttgaataacaatgccatagatacaactgatttttggaatttgtgtaaaaaccctgttccccaaaaatttattattgtaacaaatacaacattacccattccattaaagcaggatgatctttggaatctttttagtttcggatatttattgtacataaatggttatgctgtaacaaaacatccagacttagattttgataaaagtcgtaagtttaaaaattctattttatatacttcaaataaggaatatgcacagtattatgacgtgtataatcttattggggaaagccactattgtgatgatgttttgagtcgatatctcaatatgtatcatattctagagtatatggtttttcgttcccacttagtaaatctttcaaaaggctcaatacgaaagaatgcttttgtaagaaggactattgaaaagatgacccgaaataataaatcagaaacggatgtaattattgatacgcttccaaaattatttccaaatttaagttctatgataggattagacgctgcccaaaaaagaacggttcaaacattctttgatataaacattagtggaagctcggataaaaaaatggctgaattgatttataagataaggaatagtatcgctcataataaagcaacagaacttcattttggatttggaaatattgatgaatatcacgctatgataagcgtaattaggaagattgtagagataatggagaatagaattattgacttaatcaataataataatcctaaccatcctctagaatacgaaaaacgagaatttttagtttattgatcgatatatgtaacaattttgcatttatcatacttttctgatatttaaaattagagtaaatattatatagaataaggttttagggtactgattttcaataactctgtttcttattctatataaactctattttcttagaatgttttttcgctatttttgcgaaaacaatgcgaaaacaaattgtttcagttatgggtatttaatgagttttataaggaatagtaaaattataactacttgatattcagttaatattgataaaatgaactatcgtagaatatcatcttatcgttctcataatctggaggtccctggttcaagcccaggctggtccactgaaaaattcctgcaagtgaagcacttgcaggaatttttcctttttatagccatcctccaactagaataaaagataactaattgttcccaaacaggtaaaaacaacagcaacggacaaagcagaaatggcgaagaataagcaataggggaataacacctataatattaagctatagagtacccaatattaaataattccaaaatgtttcagcgctttacaaagcccgtcattctccaccgtatcagtaacaaaattggctgaagccttgactatctccgatgcatttcccatagccactccgattccggcaactttcaacataggaatatcattaccaccatcgccgcaagccattatttccgtcattccgatcccataataatcagcaaataccgaaaggccggttgctttacttattcctgccacatttacgtcagcaaataaaggatgccagcgcgacaaggaaagattaggcagaaacgacatcactttttgttccatctcatcatcgatataaaaacaaagctgacaacactctttcttttcaaacaggttttcaatgtctacaacggtcgggatagggtgttccacgattttagcaatctgttcgacagtcggagtcagacgattaacaaacacaccttcatccaattcaatagcgactgcaaaatcaaaggtctttgctatttccatggctttcttaaaatcatctttcggaataaggtgctttcttatcacggtgccatcccgcaaaacacagtcggcaccattcaatgcaataattccgtcatacggaacatcagctatttcatgaaggtcgcctgccgctctaccggtagcaatgactattcgaattccaccgtcatgaatcttcctaagggcatcaacagaggatggcaacactttatgagtttcaaaacttaccaatgttccatccacatcgagcatgattgcttttatcataacatttatatctttattcattcttcgacaatttagagaagcaaatcgactatccttgactgataagtcagagcagtcaattaaacagtgacaaagttactgaaaaaattcccataacaaatacaaacctccaacacataaaataaaaaaggcaaaaggaaacgagatccttttgccctatacctattgataccaactgaaaattgatagtaaacgtttagcggaagtcctttaattcttcctgcaatttctgacgggtaaagaatatgcggctctttacagtacctaacggaagattcagcttttctgcaatctcacggtacttgaatcctgaaacatgcatagcaaacggaactctgtattctttcggcagagcattgactacgcgatgcatttcttttaaatcgtaagctctttccgtactttcaaaacctgaatcttgtggcaggttaaggtgatagaggttttcagtctgatcgacaaatgtctgatcgcgcactattttgcggtaattattaataaagatgttccgcattatagtatacatccatcctttgaaatttgtgtcgggggtatatttatcttcgttatccaatgcttttaatgaggtttcctgtaacaaatcgtttgcttcttcacgatcggttgtcagtttatatgcaaaacggagtaattcatcctgtactcctatcagatctttcctgaagcttaaacttttcatatacgttatttttaaattgtgagtattcgttatcatcatttcgatgttgcaagtttacgcgttttcaacaaatgtggcaggtgaagaacaaacattgtttaggggaaaatctatcagttgatagaatttaggtcatttctgatagtattcaggtggttttgagactgtccttatagcgaaaatcccattttgaagtcacacctgactcaaaatgggataacacaaacaaaacaaacaatattagcgattttcacaaacagctgtctttttcatctttaaaaattcataagacttaatttagaatctgttactaaaacattctaattatgggaacaaaagtattattttccggcaaaaaggaacgtagaaattaagaatagttataaataatagttgttttatgtataaaaaattgtgcctgactataaagaattgtatttaatatttgctgccaaaagaggcataaatgcttcatttgacgatattttataatatcagtattccaaagcgatgtaaattctcctacttctttttttcactaagaattaatttctatatttggagaatatacaaccaaattcagatttactatctatgactgataccatctcttaccaatatgcagctccttccgcactgcaacggtcagccgatcaggacgaactgtttcttgccaaatacagcgaaatagaaaagaaagaagcaccctgtttcttttggggaaagttgacacaaccctacatgacagcacgctgcctcatcgcattatccaatgttgtgcagtccagttttaatctgacaccgtcacagctttccatgctgaaagatccgattgtaaccgcaggaaatgaccgcctgcgttttgaaggattctctaattgtgcaggtgtatatgccagagtcgacgtgcttcctgacggacacgacggagaatttctggaaaacgggacaacaaacgtagattttaatcccggaatgatttctgccttaggaggaataggcagacaggagaatatggtaatgtcggtcggttccaaagaggtgggactttatcataaaggtgagaaagtgatagaacgaaaagtacctcttcccgtgaaatggataaaagggctgactacagtacagatttatcaatccgttgcggaacagctctactccttcaatcgcatacaaaccttgcaactcttccagactcttccgaaaagtagtgtgaaatgcgactattatttagtgatgcgcggtcaaaaacccgccttttcaccggtgaaaagcatgaatgccgtctgcattggaggacttcatcgcttacgtctgctcgagcccttgcttccatttgccgatgagctgaaagtctttgcgcatcccaccatgcaatctaccatttggcaactttatttcggtccggtacgcttcagcctttctctttcccgcgaatgttggagaggattttccggagaaggcgccgcactggaatctctgctcgaagatgtccccgaaagatggatagaagcaatggataaatacagttatgccaaccaacagttcaaccccactctttttgccatagaggaacatattgacctggagaaggtagattccctcgcggcacggctggcagccatggggttattaggattcgatttggatgaaaacagcttcttctaccgtcgcctgcctttcaaaaccgaacgtattttaagtctcaatcctcgaatgatagctgcagaaaaactactggaagaagaaaaagtagaaatcatatcgaatgacgagaaacggacagaagcacgcgtggcaggaagcggaggtgtcagacatacggtcattctcgacagagaaagtgagaaggagcgttgcacttgcacctggttcagcagcaatcaaggagaacggggagcttgcaaacatattctggcagtaaagaaactagtacaatggaagaactaaaaaaagaactcgagaaattatccaaggcttatgtggatactccggagaatgaagagaagatattaatcccttttgtcaagagattactggagttaccaatgaaagaaaggcggaagctgctgccggttatccgggatttacaatggataaaaagtaagtttgccggtttcagtagtgagacaacctgcagtgcggcacgggcacattttctatccgctgttcagtttgtctgcgccaacaaacgagagatggatatggcatatcatgtaaagtttgatatgctttgcaaactactcccactttactaccccacctggctgatggattttatcaatgatgacaaaacttggtttaatttcaatctcaattacgaacagctgatgcagctcatggatatgggatacctcaaagaaattgctccaagccgcattgcacatgtactcccctggattacccgcatcagaaataaggaacctaaaggaaacgatactttcaacagtgagttattactcaagcgtgacatcaccctgaaagaacatatctggacgattttcgaatacgaatcgtccatcggctatcaagataattgcgccaaagaggcttataaaaaaggagttaccgcacgggatgaaagtatcagtgccgctctctaccgcttttcgctggacggccatctggatagagaacgcctattaaaagccacactcgccaccttccaccggagtttcaaaaaagatatggcaggatggtttgccggattcttcgaaactctgcaaccaactaccggagaactgttatccttgcaagaagagatgatgcaaatattcacctcttcctataccaaaccggtgaacgtgatgttgcaacagttgaaaaatattgcatccgaagaaggattccgttatcaggaattcatcgaacgtgcaaccacccttttcttctccagccccaaaaactcgctgcttaccatttacgccctctttgaaaagatcgtcgcacaacatcccgagatgaaagagccctgctgcatcactctctgccaactcttcttgaagaaagacgaaagccttcaaaagaaagccgctaattttatatcaaaatatggagacgtctcttcatccaatctccaggaaacactgcaatcttatcaaccggagatgtttcaaagcgtgcatgcgatactctcttctttcaaaccgcagcctacagaagaaccccatgagcccgatgcaagtgtgggagaaacggtacacatctgcagggaagacaaccctattcccttccccgccaacaaagaagatttcctgttccagcttagtcgtttgttcgacatggaggaaagttgggagatagaaacaaccatcgccgccatcattgctttccatccccaattggacaaagaagatctcaaccggatggaacctgttttccaacgggctgccactatcgttgccaatagctgggagccatacgaagatcttctcgctaccttcctactggaatatcaacgcttatgggcacagaaagatacctccaacacaggatttttgagaaatatgttcacccgactggaagaaaggctgaaaggaatagatgaaaacagaggagcttatgacgagcgctctttcaaacgacttgccgactggaaacccggctacagcaacgcaacctgtttcacacccatcaaacatttatggctaaatgtgatccgtaaaataaaaggaggcaatgccttccccctactttctactcccacccataccccggcatacgtacaggctaccgaactggtacgccggcttgccgtatatcagaaagcagaaacgaaaccctgtccatgggatttccagctagctattgcccgatgtgccatggaagacaaagaagaagccatcgccaccgcccggcaactgttgcaagatgaatacctgcatctctctctgttcctgttggatgaaaacacgctacccgaaccgccctacaatcatccgactgcctgggtggccgccggactggtaaaagcaccggagacggaattcgaagcattcaaatctttcgcctgtaacacattaccacacaactatctgacaggagactacgagtggaaagaggtaaaacccaaagagaaatcatacgaaacagacaggcgtctgctccaactcgagttctacaaatggcatacatatgccgaatgcaacagccaccagttatggcaggaacatctgattatcaacagtaaatataacatggatgattcccgttacatggaacctttgttatgctgctttcccaaccgcccggaaccattaatagcccagattatcacttgctacatgactttcggcactccgcaggaagacagcaaacgcaccctcgcctgtgccttgcgcatgttgttgtctttccactgcccgctcaaagagatgagtttgctcctactaagtggttcgctgctttttgtagacaaaacagtccgttcctatgcagccgaattatgggtagaaggaatatccacaggaagaataaacaatcaccgggtaggagaaatcctggcccgcctcatccagatggaacttgctccgctaaaacgcttcaccacacaagtgtacgaaagcatgtacaaacgaagtactttccacaaccagcaactggaagcactgctcacagaatttataggcggattgccagacaaacccgttaccggactcaaacaactgctcgaactttatctggagctattgaccatcaaccacagcaaggttacagacgaacaaatcctgcaacgcctacaagaatggggcacaaacagcaacctgaaaaaagtgacgacttcactcaacaacctataacaaattcatgattatgaccatagaagaacgcctcaacgagatagtagaaaaaggacaaggcgatgccatcatcccttttctgcaaggattaacgcaggaagaacgaaaaacgcttgttccctgccttaacaaattggaagaacactacaataaattcgtgcaacttaacgagaatacatacggtacacgcggaactcccgaacagcatcgtatcatcaatcttaccgccctcgtcatctattcgctaaaagaattccgcaaacacgaatggggaatctatacagaacagctgaacgaattgattccgtggtatattccttcctggctcgacagtttcttcaaagagggtgaaagcagggaatttggcggtttctatggaatgaattacgaaactctgatggattggatagaacagggagtactcaccctaacaccctctccgcaaaccatcgccggttatctggtgaactacatgaacaataccgatttcctgcaaaagcgggcaatcacactcaaagaacatatctggtatctgttccaatacgattgcggacaaaactggacggataatcgtacaggcggacagccttatttctctttcagatacttcgtagaacacggtcaactagatcgtatgcgtgtattaaaagaatctctgcttgccgtcaaccggaatctgaacaaaaacctaagcagttggtttgcaggcatgtttaccgcacttaaccccagtacagaagaacaactaacactacaaccggaaatgtttgccgttctgtccgcccctcacagccgtccggtaaatatcatactcggactgctgaagaacttatgcactcacccacaattccaggctgaagagtttctaagtcagacttccgtgctttttgcttcggacgtgaaagcgattcaccaaaacacactggcagtactccataagctggcaaaagaaagaaaagaacatcgcgacactatctgttgtgcagccgcacaaggactgatgagccgggaagaatccacccaaagtaagatagtcaaacttattcagacgtatggagagacggcatctactacattaaaagaggtactttccatatatacggaaaccatgttggctaatactaaaaaggagctgaaagcgtatttggagaataatgagccggaagattccgcctctttcacgtatgagccaatactccctatcatccgtgaagacaaccggatacaggaaatcacttccactgaagacctgatatttctagccagccaagtgctcgacgtgaacgagatctatcacttcgacctgttactcggagccttagtgaaatgggaccggcaacaggaagcaaaacaaatctctcaatggacccctattctccaacgtgcctacaaattgctgatgagcggaggaagttcccgaaatggtatattagaccagttaatggccaccttcctccttgactatgccaaactgctgattaaacgtttccctgaagaagcccaagagttaaacaacttacatctgaaaatggtacaaaaagacgaacttcaaaaaggcaaatgggggtatcgtaatctacaaaaactcaccattcgtgaaaagacgaacaaaaaaataaagttccccgttcataagcaactgttatgccggacattagaccttctggaaagcaaggagaaacctttgcccctattgtccactcccactcatacaccgatgtttatcgctccggaaaccctgatagaaaggttaaaacaatatcagcaggcaaatgccgaaccggacgatatggatatgcaaacagcactttcacgagtggcactggaaagttcgtcgcaagagcttcctctgctcctccgaagtttgaaaggagaataccggcacctgctcacttttttgctgggagaaaaagacgtacttccccaagcacctttcaatcatccttcctggtggatgatggcaggattaatgaaatcaccggaaacaatctatgctgaatttaaagatttctcctataataaaagtccacgtgaatttctgaccggaaactttaaatggagaacctatcagtatactgactcgtacacggattataacaagaaaacggtagaatggatttgttcaactcttactttcgatattccggaaagcgagaactctcatgtcatcaataaagacaaatataatgaaagagtcagttactattcatacgatccgcatccgttactggttgaaatgtacccacagatagaacgttttgacgacatacagaacgacttgccacgtttggcatggttaactcccaatataccggagccactattggtatggtgcatccgcagcgccatatacgacccgacgttaaatgaggtaagggaagcaggtatcacccaagctgccattgaagcgcttcatcagttaaggcatacatggcacgaagtgtcttatctactggaagccacttgcatgctggtagccgataaaacttcccgttcctatgctgccgaaatctggatagagcgtgtaggtcaaggctgcatagacagtggacgcataggcagcatcttaagttcgcatcaacataccggctggggaccgctgaaaagactcactgatctgatacagcaacaaatgataaacgtcagtccgctgcataaccgggaattggagaaactaatcgtggcaatgttggccggacttccagaaaagcctgtcaaagacttaaagaaattactggaaatatatgcggagctgttatccatcaaccatagcaaagccgaagacgaacatgttttgcacctgcttgacgcatggaaaggagtggccaatctgaagaaagcagcagctaatatccaacggtaagagaggtagcttattggagctaaagccaaaaagaagtatctttggcacactaaatacaaaaggttgaatgattattctaaaatatagtttagctattttctgtttactgctgacaggatgctccttcttttccagtcataaggaaaaggagagcactcccctcatggaatacgaacaaacgacggaggatatacaaccacgcgaagaatgttccaccgtttcaccaccggagcgaagcgaaatggctctctacatggactcattaggactcgtcaatatagctgacctggatagcagtctcgttgtaaaactgatgtatacacaggctgataatttcacaggcgaagtgctttacgacaacttaacggaagcctacctgcatccggatgcggcatacgctctgatagaagcacaaaaagccttaaagagactatacccgtcttatagtcttatcatttacgatgcggcacgtccaatgtcggtacagaaaaagatgtggaacgtagtgaaaggaacgtccaaatataaatatgtctccaaccccaaccgtggaggcgggttacacaactacggactggcagtagacgtcagtatccaagactctctgggacagcccctaccgatgggaaccaaagtagaccacttaggcatggaagcacacatcacagacgagatcggattggtacataatggaaaaatgagtgaaacagagcgtcagaaccgattactgctacgaaaagtgatgaaagagaccggattccgtgcattacccagcgaatggtggcatttcaatttttgcagccgggacgtagccaaacagaagtataagttaataccataaccgacactcaacaaccccataatcagagctcgacgattcattgtaatatcctataacacaataacaccatgatgcaaatctctcctgaaacccaactttttattcgcgaacattcatcggacgatgtacgtgtgctggctttacaagctaaaaagtacccggatatagatatgccaactgccatcacccaaattgcaggaaggaaggtagcagccgaaaagattccctcatggtgggagatcgaaaagatatggtatccgaaacatctgtcgctggaacaatgctcttcagaaatcaccgcccgctacaaagcacgtcttttgcagggagattctctgaccgacctcaccggcggattcggcattgactgttcttttcttgccaccggattcaaatccgccacttacgtagaacgtcaggaggaactctgcgaaatagcagcacataactttcccgtactgaatctaaaccatataaacataaaaaacgaagatggagtaacctacctgcaagtaatgtcccccgtagactgccttttcctcgatcctgcgcgccgcaatgagcacggcggaaaaacggttgccatctccgactgcgaaccaaacgtagccgaactggaagagcttttacttcaaaaggccaaccgggtaatgataaaactctcccccatgctcgatctttcattagcactgaaagaactgaaacagacacaggaagttcacattctgtccgtcaacaacgaatgcaaggaactactaattctactcggacaaacatcaccggcagaaatctccattcattgtgtgaaccttttcacaaaaggaactcaaaaagaacaacactttgtattcacccgcgaacaggaacaatgcagcgaatgcacatatacggattctttagaaacctatctttacgaaccgaatgcctcccttctgaaagccggtgctttccgaagcattgcagcagcctatcctgtccgcaaactgcatcccaatagccatctttatacttccgatactttcattgaaaacttccccggaagaatattccgtattgtcaaccagtgcagtttcaataaaaaagaagtaaaggaaaatctggcagacctgaaaaaagcaaatgtgactgtccgtaacttccccgccacagtagccgaactccgcaaacgaatccatttggctgaaggaggagatacctacttatttgccagtacattaaataatgggcaaaaagttctgattcgctgtgagaaagtctgaactattttctatttttgcaaaaaagaaacacaatctaaactaatccagatgaatcaaacactcataaaagcgattctattactaatcgcattcaccttgtcctgtcacactctacttttctcacagagagattttgagcgacacgagttctcttttcacgcgggctacggtgttatgttccatcaccctcctacactcacgttaagtacccatagttaccaacgtacactcgcacaaggcgtaagctgggatggacaatataatttccgccctctcaaacgttttgtctttggaggaatctactccggattttcttccaaaggaagtcatcctgaagggaaggaccatttatgggttcatttcattggtactcaaatcggaatgtgtaatgccaacaccaaacattggcaaatccgcgtaacaactggtcccggtggagtcattctacggaacaacagtgaggtgttcggcaaaacacggaaagtgaaagccttcactattggtctcctgaccaatgccaatcttacctataaactgaatcccaatctgggagtcagtctaggagtacaatatatgtatagtgaactgcttagaattagaacccactatcacggagaaagggttattgtaaaactcgatggcaataatgataccaacctcacacgaataaatttcactacgggattatcctattatttctaacattcactcaaaaaaagcactatgaagaaatatatactcattcttttttccattatcagcttttggagctgtacggaagatgaatcgattgacattacagttttaccttctgtcaccactacaggtgacaacacctttggctgtctgatggacggatggatttatgtgggaggacgatacctgaattgggggcactcgtatgtctggacgtatgattcattccactactatccggaggaggacaaactatccgtcaatgtttccgtcaaacctgacatcaacatacacttcatcattttatctccccaggaaggcaaagaagcaactctcaccgatatacggttcagaggagaagaactggaagacggaacagcttttataagccatttcgacccagaattgaatattatcagtgcaaccttcggcaacggcaaacgtctgactaacggacgttttgatattcattatacaacacaacagcaataatggcggcgacagtaataactattcagatttactttcttctcccgccttattggaaggattgttacttttctgatactctttgggagtggttgtctcatttccatcccgtacagccatatagtgcggcgacataatttcaatgccggcttcattaaatttatcctgaatattctgatgcaaatccgaataaatctgtgccattttatctgcctgtttgatataagcattaatttgatagaccggataccagtcgctcaaagaagtctctaacacaaacggacgcggatcatccaccactccgggagtattcaacgcagcatcaatcagtatctgattaacctgtcgccagggaatatcataaccgatagatacttccgagtgaataatcagtccatattcacgtgccgaagtactgtagtttaccgtatgagacgacatgataaatgaattgggaacagtcacaacctcatttttaggagtccgaatacgtgtcactagaggagtcttttcaatgatatctccggtggtatcattcaatttgatccggtcacccatcttaaacggacgcatataagtgataaccaatccagcgatgatattaccaataaccgtacttgatccgagcgaaacaatcaatccgacaaataccgaaataccttggaacactccggaatcggaacccgggagataaggataaatcatcgcaatcataaatgcatagagcaggaaacgagcgatatggaaagtcggcatcgcccagtccggatagaagccgttgattttgagccgtcctgcttccacctcacgtgccagatacaagacgagacgtaccaagtatttcacggcataccagataacgatgatagtaaacaatttgggcacatagtcgataatacccacaaagataccgcgaatcggattccatatatatcctaacagttggtatgccagtccttccgtctgggggaagatgatgaaaatcaacggtacggtaaacagtagttgcaatcccatcaatatataccgcccgatactggacaggaataccaacaggtccgcctgtttctgcgcatccagcaattcatacccctggatggataccggttttatcttcgtatctttcaggcgcaggatacgcgctttcagtttacggaacaaccaattggtcaagcggaacaggaaatactgtcccacaattaccaacacaaaatagagcacacgctttgccatccgccaaagtccgtgctccgctttcatctcatgcagtttggtaatgacgttctgctgtctttccttagctaacgaatcacgggaaactccttcccacaaagcatcctgatcggtaagagaaagcaggactttactgccgtacatcaaatcggaaacaatgtccgaatggtcgatagccacagaatcgggttgtagattaaagcgtcttcctatctcttcaatcgctgcaccggtcatttgggcacgttgctgaggagtatatccgcctcgtttggtgaaaaggtagaataaggtatcaccgtccgccactaccggtattcccttagtgaactgacgcagagagtcaatacgctgtcgctgctgtacatacttgacggagtcggcagtagccatctggagcttcatctgctccatttccatccgcatattcgcttcattgagccgggcttcttccaacgatttccgcatatccgccagatggatagagtccgaatcccgtttcaaaggaacatgtccgttcgttactgtatctccggcaaatatcttcttaaccgcctgttccaactgtgcctgcgccccgattgccagaaaagaaaggaacaacaccagtaacgaccgttttattttatttatttccataccttatatcccttgattataattaaggttaatctaacttttcataaaaaacagagcaaacatacggattgtttttgacattaccatttccaaattgattatctttgccactaaaagagaaaaagcatgaatatattattacttatcgggggattaatcctcattcttctaggagctaacggattaacagacggtgccgcctcggtagccaagcgtttccgcatccctcccatcgtgatcggacttaccatcgttgcattcggtacttctgccccggaactgacggtcagtgtatcttctgctctcaaaggaagcgcggatattgccataggcaacgtggtgggaagtaacattttcaatacattgatgattgtaggctgcacggcattattcgccccgattgtcatcacccgcaatacacttagaaaagagattccgctctgcatactttcttctattgtcttgctgatttgtgccaatgatgtatttttggataaagctccggagaatatcctgaacagagtagacggcttgttgttgctttgcttctttgtcattttcatgggctacacttttgccatcgcttccaagccggttacaatggaacaacaagcagaacatccggtcatagaagaggaaacagaaatcaaatcactgccttggtggcaatccattctttatatcatcggaggcttggccgcccttatttatggagggcagttgtttgtcgacggtgccacgggcatcgcccgcaacctgggtgtcagcgaatcaattatcggactgacactggttgcaggagggacttctcttccggaactggctacgtctatcgttgccgcattaaagaaaaatccggaaattgccattggaaatgtgattggtagtaacctcttcaatatattctttgtactgggatgcagcgcgagcatcactcctctccatcttagtggaatcaccaattttgacctgtttacattagtaggttccggtattctgctttggttattcggactgttttttgccaagagaacaattacaagaatcgaaggagcgattatgatactttgttatgtggcgtacacggtagtattaatttataatacctaaataatataacaaaacacctgatattcagcttcattccaagtaaaatttccttcttcaaacatagaaactggtacaatacgaatgtttaatgatttcttccccttagtatacctgactggaatttcaaaatcatcttccagccaacgtttataagggttactatcagctacataccataaacgttctgtaacttcttcgccatcaacaaaaacacgggctgcttgtcgagcatcgttttgatcgctcaacctacgcaaacgcactccttcattttgagaagatatgttcactctaaaattactaaaattttcaaaccggacaatttctcctacatataaaatactatcctcatttccttcaaagaaactttccaattttgttcttcgtacattacccatagctttataagagtgttgcttaatggaatgcgaagaacttaaatccaagctatcagtcttcaccagtacatttttatcttgaccataataaaatatagtacccgaatgttccaaatactgattattatattctcccgactctataccaaacttcaactctgaatagaaaggataactgtcgcctatacaaaaacgagtcattgaccatgggttatccgaaagaccgtcataccctcccattggatgcacttcgggcggagtcggaaatccccagccataacaaacataactttcagaaccgtcgctctcaacttgtggagtccgtttgccatcaatatatatacgaacatccccttcacaagaaataatatgtgagcgttcggcgtgacatgtaatatgggcagcaaccatcttccctcttccttgaatagcagctatcggactatctgttcctgccacatattttctcgtataatatggtgtattacgaaaatacccggtattaaatgtaggataaaccgaccgggaaactgctatttcagaaaatcccaaagaaacaggaacaccactacgattttcaattattatcttcgcatgcttccaatatggcattggaaaataattataaaaccaaccgtatgtgttatatcctgacagcagatagttggtatcgtgaaagcccaaagaattacctcccaaacacgccaaaggacaagaaatatcgggttgttgatgagcatcccaaaacatatgaatccatacattctgcaagtgctgctcattaatctccggaagataaaattttaaagaaccaatagctccctctcctttttcatccaataaagtaatggactcgccagcattgatcttttgttccgacttacgatgatatgccaattgatctttacacaaaagattgcttccttgtttcttccataattgtatcaaagtatcataattctccttcccggtaaaggtcttgataccattgtccgcataagtgtggtatacaacatgtccccaacctccttcacctttggttctttcataaccttccagtttcacatcggtagttacacggcatcccttgttaaacggcattggaacaaaactccgtgcaacacgtatgggccctcttccgttatcaaacggaccaatataactttcagccaaaggttttataaaaggttctttttctccgaattcagataaacgcaagctaaaacgaggtgtttcttctccatcaaaataaaaacggaagagcggatcacttgaactcatatagcgatgttgtacaaggttataaatgcatcccggaccatcaacatcaaatattacccactctccacgttggtcctgataaagactccaatcccagtcggcattctttcctcttttatcaatgctgccttcataatggaccgaaattccacgatctaacaagggcaaagatgcaatatcaaccattcgtgatataccataagatatactatcggtttgccaacccaaccgtgatacagagactatcggaccaattgccgacaatgacacaaccccgaaaactaccaaacaaactaaaaaaatactttttttcataaggtgataaatataaaataaaacattaatctatctataaaatttaattcataaaagtacggcaacttatataagcatacaaccactttattatcaaatcaatatactatttcgaccttcaaaccatctgttatcatatttatttcccggcttaatccctttttgtatatataataaggtaatatactcttgtttgaaataaatagtaagaaaagtatcagtatatgataacaaagcacttttttacatattttttttgtgcttactttgcaacgtccatcttatatgttatacctaatttattatgaaaatgaagaaagtcattttgtttatcaccttattctccatgatatcattattcagttacagtaaaaatcctgtaaaacaatggggacaactacaagtgaaaggcaatcaattatgcgatcaaaccggagaccctattgttttaagaggggttagttatggctggcacaatctatggcctagattttacaataaacaatctgtaaaatggttgaaaaaagattggaaatgcaccgttttacgtgcagcaatggggacagttattgaagacaattacattgaaaatcccgaatttgcattaaaatgcatgaataaagtgattaaagcagcgataaaaaatgacctctatataataatcgactggcatacttattatccgcaaaaagaagaagcgaaagcatttttctcgatgatggcacagaaatacggaaaatatcctcatattatttatgaaatatataacgaacccatggaagacagttgggaaagcgtgaaagaatatgcaactgatattatctctgaaatacgcaaatatgatcctgataatattattcttgtaggcagtccacactgggatcaagatttacacctggtagcagaaagtcctttaaaaggattcaataatataatgtataccctccatttctatgccgccactcataaacaagagttacgggatagagctgaagcggcatgggaaaaaggaattcccatttttgtttcagaatgtgcaggaatggagtgtactggcgatgggccattagatataccggaatggacccgttgggtagaatggatggaaagtaaaaagatcagctgggttaactggtccatttcagacaagaacgaaacttgctctatgattctcccgcgagcaagcaaaaacggaggatgggatgagtctttaataaaaccagcaggacgccaaagtcgtaagtttatccgacaatacaactcatatatttataaaaataaagaatgataaaataatatcagttttaggtaaataacgtcaattatttactttccttatttactagctttgcatcaacaataaacctacgaaattttataataaagttaattttaaatttgagaaaaatgaaaaagaatctcttttcttttccccgctcaaaagtgcggatgttaaaaggatcaaaaggagtctggctcttcttgattatgttctggatgataaatacagctgcctcagcagcaggtattgagattaaaggtactgtaacagacagcaaaggtgaacctcttccgggagttaatattgttgagttaggagttaaaaagaataatggtaccatcactgatttaaatggtaaatatactataacagtagaaagccaaaaatctgttcttcagtacacttttatcggttataaaacaacagaagtcactgtaggaaaccgtaaaacaatcaatgtttcactcaaagatgatactcaatctctggatgaagtagtaattatcggctatggtacaatgaggaaaaaagatttatccggagctgtttcttctattaaaagtgatgacttgatgcttggtaatcctaccagtatttcccaagctttacaaggcaaattagccggtgtacaagtaaaccagagtgacggtgctcccggttcaggcgtaagtatcaccatccgtggtgccaactcattttctacaaattcacaaccactttacattgtcgacggcattccgtttgaagtaggagacactccaagtagtaaagcaaatgaaggcaataactcaacaaccaatcctctttcattaatcaatcctaatgacatcgaatcaatcgatattttgaaggatgcttctgcaacagccatttacggttctcgcggagctaatggtgtcgtattaattaccactaaaagaggtcgtgccggagatgccaaagttgagttctcggccaacttcggactttccaaaatagccaaaatggtcaaaatgctggatgcttacacttatgctaattatgtaaatgaaggtgtaatcaacggagctgcttatgacaatcttccctattcatacctgccttatcgtggaaaatggaactaccgtcgcgacgaaaacgataaaatcgttcctaactccggtaaatactatgcttcaccagaagattatctcaatccgggttatcgtgaagacgaatatggcaataaagaatgggtagaaggcaccaactggatggacgagatcttacaagatgcattaacacaggaatacaatcttagtgtatcaggaggaaatgaaaagagcaactatgcattttcaggcaactatacagaccagagtggtatcatcaagaattcaggttatgaacgttttgctgttcgtgccaacattggaagccatgtgaaaccctggttaaatacgggactaaatatcaactttacccgttcgttaactaagtttgccaagtcaaattcctatgattatagtatcatccgctctgctatgctttatttaccaacattatatgtaggggacaagacagaagatgattcttatgcatggttatcagccaatccacgtacatacgttaatacagctaaagatgaactgaaatcaattaatgtatttacttctgcatttgccgaaattacaatccttgattgtttgaaattccgtcagaatctaggtatcagttattctgtaaacgatcgtgcaagttactacaatcgtgaaacaggagaaggtaaagcttccaacggacgagctggtaaaagcgacaatttctggcagaacttaacagcagaatcattggttactttcgataagacattcaacaaactacatcatctcaatgtagtagccggtttcacttacgaaaaatcagactggggtggcaaaacaatgaatgcgtccaacttcccgactgacatcacacaggacttcgatatgagccaggcgttaaatattgagacaccagccagctatcgaggacaagcagttctagtctccttattaggacgcgccaactatacactcaaggatcgctatattttcacagcatcgttccgtcgtgatggttcaagccgtttcgctcccggaaataaattcgcgaacttcgcttcaggagcagtagcatggactatatctgaagaagaattcatcaaaaacctaaatatattcagtaacttaaagttgcgattcagctacggtcaaaccggtaatcaagcgatcagcagttaccagaccatcgcttcacttgcaccatccaattaccctctcgacggaacattgagcagtggatttgcaggacaaacttacaaaggtcctttgaatgacaaactcaaatgggaaacaaccgaccaatataatgtcggactcgacatgggattctggaataacaggattagtttatccgctaactattattataaaaaaactaatgacctgctacaaaatgtatctataccgaatagtaccggttatactaccatgtggacgaatttcggtcatgtaaaaaacaaaggacttgagctaaccggtaaaatcattgcattagataaaaaagactggaccttagacttcgacggtaacatctcttttaataaaaatgaaatcggaggtttaacggccgatcaatatgctaaccaattatggtatagtgccaaagaagtctttctgcaaagaaatggattacctatcggaacactcttcggctatatagaagacggcttctatgataatatagcagaagtccgtgcagatccaatatatgccaaagcatctgatgatgaggctcgcagaatgatcggtgaaatcaaatacctggacaaaaacaatgacggaaaaataacgtcagaagaccgagctatcatcggtgatactaatccagactttatttacgggctgaacgccaatttacgatggaaaaatctgactctgggattgttcttccaaggtactcatggtaatgatatttttaatggtaacttgacaaatatcggaatgagcagtattgcaaacatcactcaagatgcttatgattcccgctggacaccagagaatgcagctaacgccaaatggcctcgcgtcactactgcaatgacccgtgacatgaaactctccgaccgttatgtagaagatggttcttacttcagactaaaaacgatcaacttaaactacaatttcggttcagtcataaaaggaattagcaacttgtctgttttcggtacagtaacaaacgtattcacgattacaggttatagttggtttgatccggatgtaaacgcctttggttctgacgcttccagaagaggagttgatattttctcatatccaagcagcagaacatattcaataggttttaaattaacgttataatctcaagaaataatgaaaaagaaaaatatattcatatatctgatggcatccagcctcctattatccggagcagtaatgacatcatgcgaaagtatgatcgaagaaaagcctttcgacttcattgtccctgaagatgttgaggattctgataacggtgccgacatgtgggtaacaggagtatataacacattacacgaagccatgttcagatacggtagtttcccacgtccgctggattatgactgtgactatatttccggtgcagtatggcagttcagccaatttggaagtggtaacttccagggaggtgacggacaagccgatgtactttggaccggaatgtactctttgattaaccgagcaaatatagcggtttctgaaatcaacaagatgcaaaatgtatcagaagtatttaaaaagaatgcattaggagaatgctattttcttaaagcatgggcatatttctatctggtacgtgcttatggagctatccctatttattccgtcagtgtaaacgaatccgggcaatatactaataatccgcgcattccaattgcacaagtatacacggaaacaatcatacctttgcttaaagacgccaaagatatgatttataaaaattcggacaatggatttaaacccggaagagtctgtgctgcaactgcggcaggtttgttagccaaagtatatgcgactatcggctctgcgtccatggctaccggagaacaaataacagtaaaaaccggcgcaccgtttgtcatgcagaatgtaaacggcactatgaccaaagtatatacagaacctgttccgacaacattctccaaggatcaagttgccggttacgaaagcttttcctctcaagaatattatagactggcctacgaaattgcaggagatataataggaggagaatatggaatacacaaacttgaggactatgatttggtttggtctccttccggcaagacttgtagcgaacatttattcagcttacaaactaagtccggtgatgaattatacggtacattattcagctcgcactactgtggcagactcaatgcagcaggaaatatagacaatagcttaacggtaggatgtagaaaacactggtatctattatttgaagaaaaagactaccgcgtggacaagggagtgttgcattgttggatacgtcagaactctgatacaagttgggggggtggttcatactatccgaactttgggaaatggcaacatatggttgaagccaaagaacctccgttcgataatcctaaagtaacctccggatggagatgtgatgaaggaggatcagaacagttcttcgctttcacgaccaaatattcacaacaaatagccgatcagactcaacctcgtacagatgccaattacccatttttacgttatgctgatattgttctaatttttgcagaagcagctaatgaattaaatggcccgacaaaagaatcggtagatgctttaaatgatgttcgcacccgtagtaatgcaacaggcaaagaactggcaaactttacagataaaaccagcctgcgttctgcaatccttgaagaacgtgcaatggaattagccttggaaggcgatcgtcgttgggatttaatacgttggggaatttatttgcaggcaatgaatgctctaggcggaatggatgaagctaacaacgtaaaacaacgttccagcaaacatctgctattcccgattccgactcttgaaatcctgacaaaccaaggaattaatgagaataatcctggctgggattaatcacttataaccatgtaaaaaacagattatgaagaaaataaaatattttgcaataatcgcagcatccatatttactttaacatcctgtacggatattgttgaagtcgacgatctgaaagccaaagaaaacaaaccgtcaacaggtgctccgactgtagacaaagtcgttttggcaacagatgctgaatttcccattgagggagcaaatttcgaacaagtagtacgaatcgagggaacaaaccttggagatatcacttccctaaaattcaatgatatcgaggtggacagtaaggagatatattcgacatacgatatgcttctcgcacctattccccgtgcacttcctaaagaagtgacaaacacaatttatattacaaccaaacacggagaactaagtattccttttgtcgtttccatccctgatttaacaatcaatggactcaagaatgaatttacccagccgggagatacgacggttattacaggtgataattttgacctctacggtattacaattgaggaagcaattgttaatctaggcaatttaccagtaaatgtaatcgatgctactcgtacagagctgacaatagaaattcctgcaaatgccgctccgaaatctactcttactataaaaggggcaaacatggatgaagcatacaagctcacatacatggatccgggagtatctcaacttttcgatttcaataattggccgggaagcggtgcctttacacattccagccaattccctgatgccccgaaagatttcttatgtgacggcacattagaaggacaaccggaaccattagtagaaggaggaaaatatattcgcttcaataattccgtgaaagcttggggatggatggttatgtgggccggatatattactgtaccggcagaagtagccgcagacccttcatcttacgatttaagatttgaaatctgtactggagctaaatttccgatatcagcccaggcgcgtatcattttaggagattatggatggtatccttccaaaggaggaattcctgttaatacttatggtggatggcaaactgtacggatcagtgccgatacagaagcattgttgcctaatcctatcgatcctagtaccaacacagctttcaaaatcatattttctcccgaatctgctcaagattttgatttaagtatgtgtaatttcaggtttgttcataagtaaaaataaaaagggaacgctcgtactaaagcgttccctcataaacaaaaacaattcgatttatgctaaaagacttattttcattattaacgattatagcacttctattttcatcttgttccaaatcagacgaagaagaaaatggtgatgaacctcaaccaaccaaacaaacagcttatttcggagttaacctgtcaggagctgaatttgggaatgtatatccgggggtagatggtactcactatggttatcccacagaaaaagacttggattactttaaagccaaaggtctttatctggtacgttttccatttcgttgggaacgcatacaacccacaatgaatggagaattaaatgcaacagaactggcaaaaatgaagaaattcgtcaaagctgccgaagatagaaacatacagatactattggatatgcataactttggaagatattgtgtatattgcgacgggcaaagttcacaaaataatcaatatgcaatcattggtaatgcacgatgcactgttgacaatttctgtgacgtatggaaaaaactggcaaaggagtttaaagactataaaaatatctggggttacgacattatgaatgaaccctacgaaatgctggcatcgacaccgtgggttaacatagcccaagcttgcattaatgccatccgcactatagatactaaaacaaccatcatagttagcggagacgaattcagttctgccagacgatggaaagaatgcagtgacaatctgaaaactcttacagatccaagtaataacctgatattccaggcacatatatatttcgattcggattcttccggaaactataataaaggatatgatgaagatggtgcaaccgttcaaacaggggtggctcgtttgaaaccttttgttgactggctgaaagagaataataaacgtggattcgtcggtgaatatggaatacctgatactgacggtcgttggctggatattcttgatgcagcacttaaatatctacaagaaaatggaataaacggaacttattggtctgccggtccacgatggggtgactatcccttatctgtccaaccgaccaataattacacacaggatcgtccgcaattaagcacgctcctgaaatataaaagtacacaacaataatcagaataaatactgtccatgagaactcgaatcatcaccattatcactttactgctatctactccaatgattattgcacaaaaatcaatggatgagatagacagggaaagctttgcagcaaagctatctccaatagaagtaaaaggtatacagatgactgaagcaggaaatattcctcttgtcagggatactcctgcgaaaatctctttggacggaacttggcaactggcagaaggaggaagtgaaaaagaacgtttacataccatctggacagatcaaatacccgcccgtgtgcctggtagtattcacaccgcattagtagaaaatgaaatcatacctgatccatacatcggacagaatgactctattgcagaaaaacaatcttacaaaacatggtggatgaagcgggagttcgaactagactccccctcatcgcactgtatattatcttttggcggaatcgctaacaaatgtacaatatggctcaatggaaaacttttgggaacacacgaaggtatgttcggaggccccgatttttcaataggtaaatatttaaagaataaaaatactctcatagtaaaactagaagccattccccaaatgtttctgggaaactggcctcccaacgcaaatgaaagttggaaatatactgttgtattcaattgcgtttatggatggcattatgcacaaatcccatcattaggaatctggcgtagcgttcaattaaaagaacaagccgcagtagaaatagaatcgccattcatcgccactcgttcgctcgatggtcaaatgcgcttaactctcgatttgcataaagaatcatctccattaaaaggagtattatatgcagaagtatctcctaaaaactttaaaggagtaaaacaatattatcatttcgacataaatagtcagaagaaacaggaaactctatctttagaccttcaaatcaaagatccgcatctttggtggcccaatgacagaggagaacaagcactatacgacctcaatctattcttcattccacaaaaaggaaagaccgcccatgcaaaaacgtcgttcggtatacggactattgagatgagaccattaattgatggtgctaaagaagattattataactggacatttgtcatcaatgacaagccgatgtttataaaaggaacaggctggtgcactatggatgcattaatggacttctcaagaaataaatatgaacatttactccaaatagcccaaagccagcacatacaaatgctaagagcttggggagggggaatgcccgaaactgatgatttttacgaattatgcgacaaatatggtattttagtcatgcaagaatggccaacggcctggaatagccataacacgcaaccgtacgctatgctgcaagaaacagtggaaagaaataccaaacgattaagaaatcacccttctcttatcatgtggggagcaggaaatgaatcggataaaccattcggacctgcaattgatatgatgggacgactaagcattgaacttgacggaacacgtcccttccatcgcggggaggcctggggaggtagtcagcacaattacaactgctggtgggacgatgcccatcttaatcataacttaaatatgaccgctcctttttggggagaatttgggatagcatcattacctcacatcgagacagtgcgtagatatttggatgaggaaaaagaagtgtggcctccccaaaggagcggtaatttcacacaccacactcctatcttcggaacaatgagagaaatggaaaagctcgttcaatattccggttattttatgtcgaaggattcgctggcttctttcatactcggatcacagttagcacaagtagtaggagtgcgccatacattagaacgggcacgcacattatggcctcatactaccggagcactttattataagatgaacgataactatcccggcgtatcatggtcatgtgtagattattatggtatcatcaaacctgtccactattttgtgcaaaagtcttttgctccgctagcggcagtcatgctatttgaccgcagcaatctttccagtcaagaagtcagtcttcctgtctatctactcgacgattgccaaatattggagaaagagccttatcaggtcaaagtgtctatatacaatgcactactagacactgttgccacccatacttttaacggcactggcgatgagaatgttgtcaaaaaattaggagaaataagtctgaatagagaacaaaccaaatcgaccatgttattctttgtcttggacataatcaaagacaacaagaatatgtatcggaattattactttaccaattacgaagtacgtccgggctccatcttatcaatgccccagacagaaataaaaatggaacgcacaggtaatatagtgactttaacaaatacaggaaagtaccccgctatcggagtgcacatagaagcaccagaaaagatggatcaacttatcgtttcagagaactatatatggcttaatccacaggaatcaaaaatattaaaaataaatttggaatctccagttattgtaaaaggctggaaccttcaatcaccctattaaacagaacattatgaaaaaagtttttatttcggcttttctactactcagccttcttactctaaatggatgtaaaagtaatcaacctccagtaaaagagacaggtgaaccttacggagtaaacttggcatgtgctgacttcggttcatcctttcccggggaatataataaagactatacctacccgacagaccaggacctcgaatattggcaaaagaaagggctgaaacttatccggttgccattcaaatgggaacggctacaacttgacttaaaaggaccgttaaaccaacatgacctcaataaaatgaaagaactggtcagagctgcagagaaacgcgatatggtggttcttcttgacttacataattactgtcgccgttacatgaacaacgaacataccctcattggaaataacggattaacgatcggagacttggcttctttctggcaagctatcgctaaagaattctcgacttttaaaaacatatatggttatgggctaatgaacgagccacatgatctgaccccggaaaccagctggttcgacatggcgcaagcgtccatcaatgccattcgggaagtcgacacaaatactcttatcatggtaggcggcaatgactggtcatcagcagagcgctggattgaacagagtgatacactcaaatatttaaaagacccggctaataaccttgcttttgaagctcatgtatattttgacaaggatgcatccggtacctacaaatattcatacgaagaggaagaatgttatctggagaaaggtatcgaccgggtaaaaccatttgtagaatggatcaaacaaaataaattccatggttttatcggagaatatggaattcccgacaatgatccccgttggaatgaaaccctcgacttattcttgggatatttacaagaaaacggaatcaatggtacatattgggctgcgggtccgtggtgggatagctatttcatggcaatcacccccaaagacgggaaagacagaccgcaaatgcctatcattgagaaatatacaagtacttttaaaaaatagaattatgttcaaaaggttctccatctgctacattttatttatgttttatttaactggaatttctgctcaagaagaccggtggacaggaaatgccacgaatctatccaaaggaaatttaagggtaaattcttcaggacgttatctggaatacaccgatggaactccttttctctacataggagatacagcatgggaactcattagccgtttaaatgacaaagaaacagagcaatatctggagaatcgtagagaaaaaggatttaccgtaatacaaacggtaatcctggatgaattagatgacatgaatgtttcatctaacggaggacccaagttaattgacggcaatattgacaaacccgctcctgactacttcacccatgtagacaaagttatttctctggctgcagtcaaaggcttatacatagctctactaccaacctggggggataaggtagacaaacagtggggaaaaggaccagagatttttactccggagaatgcatataaatacggcaaatggttaggagaacgctatatgaacgctcccaatctgatatgggtaataggaggtgatcgaagtggagacggaaagaactttgccatttggaatgcattagcgactggtattaaaagtgtagacaaaaaccatttgatgacttatcatcctcatggagagcactcatcctcgttctggtttcacaatgcttcctggttggatttcaatatgtgtcaatccggacacgcacaacaagatttcgcaatctatcaacgtctgcttttgcccgatttaaataaggaaccacacaagccatgcatggacggagaacccagatatgaaaatattccgatcaatttcaaaaaagaaaatggaagatttggagatgatgatatccgccatacactttaccaaagtatgttcagcggagcttgtggatatacatacggctgtaatgatatatggcagatgtttgataccggacgtgagcctaaatgtgacgccgacactccatggtaccaatcaatggataaacaaggagcctgggatttaattcactttcgcagattatgggagaaatttgattttactcaaggaaaaaacctacaaaccatctttggcgatgtacctttagaaaataaaaactaccctgtagcattcggcaataaagactatttattagtatattttccacaaggtggagagagaaccatttatttgccttcaatgaatacgcccaaacggtctctaaagtggatgaatcctcgcaatggaaaaatcacattctatcaatatacaacaacagataccattcccatatcctctcccacaaaaggaaaaggaaatgactgggttttaattataaaataattaaccgaaaaaaataacaatagaatatgaaaagtaatagattagaagagctaacacaaaattatgaagctcttatcaaccgaaaaaatgagatatgcagcaatagcaacggtatatacaaacgttactactaccctgtattaacagcagaacatgcaccactcatctggaaatatgattttgatgaaaaacaaaatccattcatggaagaaagaattggcatcaatgctgtaatgaatacgggagccatcaaaatcaatcataaatactatcttgtggcgcgcgttgaaggagcagaccgaaaatcattctttgcagtagcagagagtaatagtcctgtagacggatttcgtttctgggattatccgatagaaatgccggagacagacattcccgataccaatatgtatgatatgcgcctgaccgcacatgaagatggctggatttatggtattttttgtgcggaacgcaaagatgcaaacgctccagccggtgatttgtcttccgcagtagccgtagcaggtattgcacgaacaaaagatctgaaaacatggcaacgcttgccggacctaaaatctccgagccagcaacgcaacgtagtgcttcatccggaatttgtgaacgggaagtacgcactgtatacccgtccccaagatggtttcattgacgccggcaatggagaaggtatcggatgggcactcatcgatgatatctgtcatgcagaaataaaagaggaaaagatcatcaataaacggttttatcatacgatcaaggaagtgaaaaacggagaagggccacaccctattaaaaccccacaaggatggttacatctggcacatggtgtaagaggatgcgcagccggactacgctatgtattatacttatatatgacttccttagaagatccgacacagattattgccgagcctgcaggttatttcatggcccccattggagaggaaagaatcggtgatgtatcgaatgtattattctcaaacggatggattgaagatgataatggaaaggtttatatctattatgcgtcttctgacacacgtcttcatgtagctgaatcaacagtaagccaacttgtagattattgcctgcacacaccaactgacggtttccgttctatagaatctgtgaagcggatcattactatggtaaatcataataaacaatacctgaaacaataaatacatcaccatggaaaacataaaactaagagaaaaaatcggatatggattaggagatgctgcttcttccatgttttggaagttattcacaatgtatctgctattcttctacacagacgtggtaggtatctcttcggctgtggtagggacgatgttccttatcacacgcgtctgggatactttcctcgatccgtttgttggaatattaggcgatcggacaagctcacgctggggtaaattccgcccctacctactatgggtagccataccattcggcatctgtggtatactgaccttctcctcttttggagataacatgactaccaaaataatatttgcttatgccacatacacccttatgatgatggtatattcattaatcaatgttccatacgcatctctattaggagtaatgtctgccaatccgcaagtacgcacagagttttcctcctaccgcatgacatttgcttttggaggaagtattctggtactattcctcattgagccactggtcgatatattcagtaaaatgaagataacggagaatatacccgatatcgctttcggctggcaaatggctgcagtcgtatttgcgattatggctagtggaatgttcttattaacttttctatggacaaaagaaagagtgcagcccataaaagaagaaaaagggtcgctgaaagaagatctgaaagatctgggcagaaacaaaccctggtggattcttttatgtgcaggaatcatggcattagttttcaattctcttcgtgacggttccgctgtattctatttcaaatattatgtagacagctccgatacattctctttctcactcatgaacagtgccattactctaattactatctacttggtattaggccaagcagccaatattctcggaatcatgtttgtgccatccttgaccaagagaatcggtaaaaagaaaacttattttatggcaatggttggcgctaccattctaagcgttttattctacttccttcctaaagattttatctggggaattctttgtttacaggtcttaataagtatctgtgcgggtattatttctcccttgttatggtctatgtatgcagatatatcagattactccgaatggaaaaccggaagacgtgcaaccggtctgatattttcttcttcgtccatgtctcaaaagttcggttggacaatcggaggtgctttgaccggatggctactggcctatttcggtttcaaagcaaatgtaatccaatccgactttgctcaaaccggcatttgtatgatgatgagtatcttcccggcaattgccaccatgctatcagcattcttcatttcacgttatccgttaaatgaaaaaagattatatgaaatatcaacagagctcgaagagagaagaaaaaagtaaattcatcactaaccaactaaccaatatggctcatattccaattcagtcctatttgtatttactattgggtacaaccctattctcatgtgcacctcaagagctaaaaacgccatttgaattaaaatgtgagaatatacccgttcctgtaggagtagatactcaaactcccagactctcctggaaacttccgctgctagaggaagatagtatcaacagagttgagatatggctatcaacagacagtactcaattatcaggcagacagtccggttattggaacaaatccatcataggagctcctataagagtctcctatgatggacaacccttagattcatatacaacgtattattggaaaataggctatcaaacctcttccaaacagaaaactacattttctccaatatcctccttcacgacaggatgtttatcacccgacaactggaaagggaaatggattactgacaaacatgacatcacataccgtccggcaccctattatagaaagagcttccaattagacaaaacaatcgagcaagccttactcactattgcatcggcaggcctacatgagctctctgtcaacgggcaacgggcaggaaatcatttcctggaccctatgtatacacatttcgacaaacgtatactatcagtcactcatgatgttacgtcattactatctctgggtgaaaatgtaataggagtacaactggggaacggctggtataatcatcaatccacagcagtatggtttttcgacaaggcttcatggagaaaccgccctaaattcacagcacaactccatctgcgttacacagatggaacaacagaatatctgggtactgactcaacctggcaaacaactgacagcccggttattttcaacagcatctatacagccgagcattatgatgcacagaaagaattagcaggctgggactcccccggattcaacgctaccggatggtatcatgcacaagaaaccgaatcgcctacggaaacgatcaaatcacaagttatgcatccgattcgtgaaacggcccgctatacagcaactcaatgcaaaaaaataaatgacagctgctacgtctatcatttccccaaaaacattgcaggtgtcaccgagctaaaagtgaaagggaaaaaaggaacaaaactgcgcctgaaacatggggaacttttagacaaaaacggtatggtaaacatggcaaatatagattatcactaccggccgacagacgacagcgatccttttcaaacagacatcgtcatacttagcggaaagcaagatagattcatgcccaaattcaactacaaaggttttcagtttgtagaagtctcatcatctgcccctattcaattatccgacgaaaatcttattgcagtagaaatgcacagtgatgttccggccatcggctactggtcttcgtcatccgatctgctaaacaaaatatggaaagccactaacagttcctatttagccaacttgttcggttacccgactgactgccctcaacgggaaaaaaatggctggacaggagacgcacatattgccatagaaacaggattatacaatttcgatggtatctctatatatgagaaatggatgaacgacttttgtgatgaacaaaaagacaacggaatccttccatgtatcatcccaacttctgtatggggctatgattgggccaacggggtcgactggacgagtgctgtcgccattatcccttgggaaatttatcgattttacggagacaccacattactccgccgcatgtacggaccaatcaaaaaatatgtctcctatatagaatccatatcaaccaatcatcttacagactggggattgggcgactgggtacctgtacgctcaaaaagcaatataaccttgacttcctctatctattattatacggacgtctgtattctagccaaagcagccagacttttcggatatgccgaagatgcctcctattataacacgctggcacaaaaaataaaagaggctatcaacaccagttttctcaataaggaaacaggaatatatgcagagggaacacagacagaacttgccatgccattatactggggaatcgttccggaagaagataaaaagaaagttgctgccagactacatgaattggtagaaaaagacgattatcatctggacgtcggtttattaggaagcaaagccctactttccgccatgtcagataacggatatgcagaaacagcttacaaagtcgcatcacaagacacctatccttcctgggggtactggatcaaacaaggtgctacaactctacatgaaaattggcggacagatgtcgttatcgacaactcatataaccatattatgttcggagaaataggagcatggctatacaaaggactgggaggaattcagatagatgaaaaacatcccggattcaagcatattttgctaaaacctttctttccggcagacatgaatgaacttaccatacgctataatactccctatggctggttaaatatcaactgggttcgtcaaactaatgactgcatccgttatacaatcgatattccggcaggcacttctgcaacatttgttccttttacaatgccagaaccccaaaaatctataactttacaagccggaaaacattcacttgaacttgattttattcaccaattaatcaatcaacgataacttatgtacaaaagaatcaccttattcacattcatttgcctgctcgctttagcaggaatagcccaaaataaagacacttataccattttattatccggagcatcttttgccgaacctaacaataagtggtttgaaatgggatgtcgtgcccttcacgccatccccatcaatcgggctgtaagtgcagaatctattgctcacactgcaaataaaatgctggacggcactctctataccccggaagaattcgataacattgatgtatttgtcttgatgcaagtacatgaaaaagacgtatataacgaagcaaacttaaaagagaactacaaggattataaaactccttttgatgcttccgactatgccgtttgctatgattatgtcatcaagcgctacatatcagactgttataaccagaaattcaatccaaaatccagatattacaacactccttatgggaaacctgtttctattgtcttatgtactcattggcatgacagtcgtcctatattcaacacttcggtccgaaaactggcagaaaaatggggattcccagtagtagaattcgacagatacatcggattctccaaaaaacagaaacatccggttacaggaaaacaatatagcctaatttacactggggattcacaaaagactcatggagaagtatttggatggcatccgccacatggagaacattcatttattcaacagcgcatggctgcaatctttgccgatacgcttcgtaagatattgcttcccaaagaatatatcaatgaataatcaccaaatactcatcggatgaaaaaacttctatcattaacagtttgcttgctatttgtcctatcacaaatgatggcacagctttccgtaccttctttcttttcagaccacatggtgctgcaacgtgagaagccaatcaatatatggggcacagccagtgccggcgagcgaattagcgtaacattaggaaatgctcaaaagagtacccgaaccgataaaaatgggaaatggtcagtcagcctgccccctatgcaagccggtggaccgtatactctaaatatgaaaagccccaagcagactttatcatttacagatattttaatcggtgaagtatggatctgtagcggacagtcaaatatggagtttcgtctgcgtagcgctaatcatgctaccgaagaagtcgcagctgccaattaccctcaaatccgttcattcaacgtaattcaagaaatggggcacactcctaaaaccaacttaaaaggtaaatgggaagtatgttcacccgcctccgcttctgatttttcagctgtcggctatttctttgcacgtgaattataccaaaaactcaatattcctatcggattcatcaactcctcatggggtggtacggacatcgaaacctggatgagcatggaagtgatagagcattttccgaaatatgaaaaatcattagcccgtatgcgctcttctgaattcgaagaatacatcaaacacagtgacaaagtcaaaaaggaattcgaacaagccatcataaacgaaccgggagaaaaagagaaatggtatttagaaaacacctctacagaaaactggaaggaacatattgttccgtcattatggtcaaatgaggaattatccggtatagatggagttgtatggtttacttatcagttttccataccggtcaactgtttaggacaggatgcagaattgagtctcggtactatcgatgacgatgacattacctgggttaacggacatgaagtaggacgaacggtaggatatgacctgaaacgtctatacaagatcccggcagaagtattaaaggaacagaataccatcactattaaaatatccgactatcgtggaggaggcggtctatatggtcctaaagatgaagtatacctgaaagtcaacaaccgaattttccctttgtgtgataattggaagtataaagttgcagtatcgagtgcacaatatgattatgtagaatatggtcctaacgcttttccttctttgctgttcaacgcaatgattcatccactggtaggtttggggatgaaaggggtaatctggtatcagggagaaaacaatgccgcccgcgccaacgaatacattgatttatttccggctttaattacagactggagaagtagatggaataacgaattcccattttattgggttcaattagcaaacttcatgtctccggccaagcagccctctgaaagtcattgggcaaacctgcgggatacacagtcgaagacactggccttaccacatacaggacaggccgtcattatagacatcggtgaagaaaatgacatacatccccgcaacaaacaagatgtaggtaaacgacttgctttgcatgctctccacaatgattacggatataactctattgtttgcaccggcccgatattccagtcggtaaaaagaatcggagatgcactggaggtcacctttaacgcttgtgacgagcaactagtagctcgtaataaatatggctatttatcaggattcgccattgccggcgcagatggaaaataccaatgggcacaggctaaaatcgaaaacaataaagtaatagtatggaataaggaaatacagcaaccggtctctgtacgatatgcttggggagataatcccgatgatgctaacttatacaacgcagccggtttgcctgcctcgcctttcgaaggacacatcagccaataaacggcctacaaaaacagaaaaagaataccggcaatgaatgtatgatcatcatttccggtatttttcatatttacagtccactccctaatcgtccagagactatattttctctttccggcgcgttgtaatttaaagattatcacgtatctttgcttcctcaaatcataaatacgagatatggctattacaatcaagaaagtctccacaaagagagaacttaagaaatttatccgtttcaattacagaatgtacaagggcaacccttactctgtgcctgacctctatgacgacatgctcaacaccttcaacaagaagaaaaatgcagcattcgaattctgtgaagctgattatttcctcgcatatcgggacgataaaatagtaggacgtgtagctgcaattatcaataaccaggcgaacaagaagtgggaatgtaaaaacgttcgtttcggatggatagacttcatcgacgatcccgaagtatcatccgcacttatcaaaacagtggaagaatggggaaaagaacggggtatgactcatattgccggtcctctcggatttactgatttcgatgcggaaggaatgctgatcgaaggattcgaccagcttagcaccatggccactatctacaactacccgtactatccggtacacatggaaaaactaggcttcgagaaagatgccgactgggtggaatacaaaatctacataccggatgctattcccgacaaacataagcgtatctccgaactgatccaacgaaaatacaaccttaagataaagaaatatacttccggaagaaagatagccaaagactatggacagaagattttcgaactgatgaacgaagcatatagtccactttatggttattctccgctgacacagcggcaaatcgaccaatacgtgaaaatgtatctgccaatccttgacttacggatggttacactgattactgatgccaatgatgaactagtctgtgtaggtatctctatgccatctctcgctgaagctttacagaaatcaaacggacgtctgttgccgctcggatggttctatctgttaaaggcattattcatgaaacgtcgtgccaaaatgcttgatctgctactcgttgcagtgaaaccggaatatcaaaataaaggtgttaacgctttgttattttccgatttaattccagtttatcaaaaattaggttttatctttgcggaaagcaaccccgaactggaactgaatggaaaagttcaggcacaatgggattactttgagactcaacaacataagcgccgccgtgcgttcatcaaagagataaaataaaaaacagctatggaagagaacgaattgatacctgtagacaacaacaatgcagtagagtacactgacgacaacatccgccacttgagtgacatggaacatgtacgcacacgccccggtatgtatatcggaaggctgggcgacggtgcacatgccgaagatggaatctatgtcctcctgaaagaagtaattgacaacagtattgacgagttcaaaatgcaagccggtaagaaaatcgagattaccgttgaagaaaaccttcgtgtcagtgtacgcgactacggacgaggcatcccacagggaaaactcatcgaggctgtcagcatgctgaataccggtggtaaatacgacagcaaggcatttaagaaaagtgtcggactgaatggtgtcggtgtgaaagccgtcaacgctttaagctcccgtttcgaggtacgcagttaccgcgacggcaaagtgcgtatcgccactttctcaaaaggaaacttactgaccgatgagacgaagaataccgaagaagaaaacggaacttacatcttcttcgaaccggataatacactattcctgaattactgtttcaagcccgaatttattgagacaatgctacgtaactacacgtatctcaatacggggcttgctatcatctataacggacaccgtatcttgtcgcgcaacggtctggtagaccttttgaacgacaacatgacggcaaccgggctttacccgatcatccacctgaaaggggaagacatcgaaatcgccttcacacataccggacaatacggagaagaatattattctttcgtcaacggtcagcatactacccaaggtggtacacatcaaagtgccttcaaagaacacattgcccgtaccatcaaagagttcttcaacaagaacatggactacaccgatatccgtaacggattggttgccgccattgccgtcaatgtggaagaaccgatcttcgaaagtcagacgaaaactaaactgggttctaccaatatggttcccggtggcgtaacggtcaataagtatgtaggcgactttatcaaacaggaagtggacaacttcctgcacaagaatgcggacatagccgaagcaattcaacaaaagatacaagaatctgaaaaggagcgtaaagccattgcaggggtaacgaaacttgcccgtgaacgtgccaagaaagccaacctacacaaccgcaaactacgtgactgccgcatacacctcaacgatccgaaaggcaaaggactggaggaagactcctgcatctttatcaccgagggagactctgcaagcggttccatcaccaaaagtcgtgatgtcaacacccaagctgtattcagtctccgtggtaaaccattgaactctttcggactgaccaaaaaagtggtttacgagaacgaggaattcaacctgcttcaagcagccctgaatatagaagatggtattgaaggattacgctacaacaaagtaatcgtagcaaccgatgccgatgtggacggtatgcacatccgcctgttgctgattactttcttcctgcaattcttccctgatctcatcaagaaagggcacgtatatatcctgcaaacgcctttgttccgtgtacgcaacaagaaaaagacaaattactgctacagcgaggaagaacgtatcaatgccattaatgaactaggaccgaatccggagatcacccgatttaaaggtttgggagaaatctcaccggatgagttcaaacatttcatcggtaaagatatgcgtctggagcaggtgacactgcgcaaaacggacgcggtaaaagaactactcgaattctacatgggcaaaaataccatggaacgacagaactttattatagacaatctggttatagaagaagacttggcatcatgagaaaagcaatattcccgggtactttcgaccctttcaccatcggacattactcggtagtggaacgtgcacttacctttatggacgaaattgtgataggaatcggtatcaatgagaacaagaatacctacttccccattgagaaaagagaagaaatgattcgggaactttataaagacgaacctcgtatccaggtgatgtcctacgactgtctgacaattgattttgcgcaggaagtagaggccaggttcattgtccgcggtatccgtacggtgaaggatttcgagtacgaagagaccattgcagacattaaccgcaaactggcagggattgaaaccatcctgctcttcacagaaccggaactgacttgcgtcagctctacaattgtacgcgagttattaacctataataaagatatcagcctgtttattcccaaaggaatgaaaatgagtgaataacactcgttagggaataggcggtgagtcagaaaagatgatgaagaaactaacgattatactatccgtttgcttgtgggcagttgccgcacaagcccagaacttcggttccgaagccatgcgaaagctacaaatggcagagtttgcaatctccaatttctatgtggacaaagtagatgaagacaagttggtagaagaagccatcatcaagatgctggcacaacttgatccgcactctacttactcggatgcagaggaagtgaagaagatgaacgaaccgctccaaggtaacttcgagggtatcggagtacaattccagatgatagaagacaccctgttggtggtacagcctgtcagcaacggaccttccgagaaagtcggtatccttgccggtgaccgtatcattgccgtgaacgacagcgctattgccggagtgaaaatgagtacggaagatataatgaagcgtcttcgtggcccgaaaggttcgaaagtcaatctgacaattgttcgtcgcggcgtaaaggaccctttattgtttacagtaaagagagataagatacctatccttagcctcgacgcctcttatatgattcaacctaaaacgggttatatccgcatcaaccgcttcggagcaacaactgctgaagagttcaagaaagcaatgaaggatctccaaaagcaaggtatgaaagatatgattcttgacctgcaaggaaacggaggtggttatctcaatgcagccattgaccttgctaacgaattcctgggacaaaaggagctaatcgtatataccgaaggccggactgccaagcgtagtgatttctatgccaaaggtaacggagacttccgtaatggccgcctcatcatattggtagacgagtatacagcttccgccagcgaaattgtcagcggtgcggtacaggattgggacagaggaattattgtaggccgccgttctttcggcaaaggcttggtgcaacgtcctatcgatttgccggatggttccatgattcgtttaaccatcgcccgttattatactccatcagggcgctcgattcagaaaccatacgacagcactgtcgattacaataaagacctgatagagcgtttcaaccacggtgaactgatgaatgccgacagcatccatttcccggattcactgaaagtacaaaccaagaaactcggacgtaccgtttatggtggaggtggcatcatgccggattatttcgtgcctatcgacacgactctttatacggattatcaccgtaatctggtagctaaaggagctgtgattaaattcaccatgcagtttattgaaggacaccgggaagagttggcaaacaaatacaagaagttcgaatcatttgatgagaagttcgtagtcaatgatgatatgctcgccactttaaaggaaatcggagagaaagaaggggtgaagttcaatgaagaacaatatcagaaatcacttcctcttatcaaaacccagctcaaagcactgatagcccgtgacctttgggatatgaacgaatatttccgggtaatgaataccacgaatgaaagtatacaaaaagctttggaaatactgaattcggacgagtatcagaagaaactaaaatagggtattcaataaacaatcataagacatcgtccttcagttcggtggacatatatacttatcgtagtggacatatagatacacaatggtgagtatatatatccaccgcgctgtatctatatgtccactaaacacggtgtattaacctgttaacttcatcattgggtatactcgaatgtcaccgtaccgcgaatatcagaagaagaagcggcaatgtatgccttaaatttaccaggttctgccacccaagtatgctgtttatcatcaaagaattgcaatgcttccggtttgatcgtaaacttcacttctttttcttcattcggaagaagctgtactttccgaaagtccttcaactcttttaccgggcgaagaacactacactcttcgtcaccaatatataactgaacgatctctttccctaccatttctcctgtattcttaatttttacagtaagatcaatactgccatcagcattcattgttttagccgatactgcaggcttactatattcgaaagcggtataactcataccatagccaaaaggaaagagcggtcgaatcttcttcgtatcataccagcgataaccaaccaaaatatcttctttatattcctggcggatgctatcgcccggataactgatttctccaaagaaatgtgccggacaatccttcaatttcaccggataagaaaaaggtagtttaccactgggagtcacctctccactcaacacatcagccagcgcctctccaccaacagaacctaaataccatgattggacaatagaaggaatctccttcacccaaggcatttccactgcatttccactaacaatcactgctaccagatttttatttactttcaacagagcttctatcaattcattctgtccaaaaggaagtccatacgacagacggtcacccccctcacaatcctgaaaatgattcttattcagtcctccgacaaagatcaccaagtccgcattcattgcttttttcaccgcgtcattacgtaaagaatctacagttgtctgtggaataacatccgcccggccatacatcgggcgaccgcttgtatagccttgtgcataaaccacattctcaccaaacttcgcttttataccatccaatggtgaaactaccctctgaactttcaactccgaagagccgccgcctaacatcaaattacgggtagcattatctcccacaaccaaaatacgtttatattttccttggggaataggtaataatgcaggctgtttcttacctgtcccatttttcaacaagacaatgccctctgttgcaacctcataagctgtacgatagtgctcttcgctggtcagtgcaccgaacggtttccggcgattcatcgctgtacggaaaatcagacgtaacacacgtgcggccttatcattcactacctccatcggaatcttaccttcgcgaaccattttcaaataagacttacccaaataataatcatcaaaaccaaattccgattccgaagtcaaaccattcgtataagatcccatttcaatatccaagccatacatggcagcttcataggtatcatgcgcagctccccaatctgttatgacacaaccgtcgaaattccattctcccttcaatatatcattattcagcagtttatgatgagtagcatgggttccgcgcaccttattgtacgctcccataatagaccaagccttccctctttccacagcagccttaaaggcaggcagatatatctcatacaatgcacggtcacttagctgcacatcgatatgtccccgccataattcctgattgttcagtgcgtaatgttttacgcaggcggctactccattcttctgcactccctgaatataaggtacacaaagctccgaggctaaataagggtcttcccccatatattcaaagttacgcccgttgagcggagtacgatagatattcacacccggtcccagcaaaacatccttttcacgataacgggcttcttcaccgatagcatatccatatttcgctgctaatagcggattccagctagctgccagacaggtcagtgcaggaaaggctgtgcaactatcgttcgtccatccggcatatccccaatcattccagttaatttcggcacgtacgccgtgaggtccgtcactcatccaaagttcaggaatacccaaacggggacagccaggggagctaaacttcccttgtgcataactaagacgagttttctcctccacagtcatacggttcaacgcatcctgtaccctaacctctatcggttgtgtatcatccagatacaccggtgtttgttctttgtcttgagcaatcgccaccatacctgtctgaacagacaggaaacatatagtcaataaaaatgtcttcattattccaataatcatttacagtttacaattcctctgccgaaatctttagtacagcttgccgaagtccctctgaagtagccgtcagctttgcttttcccggttttccatcgttctgaatgacaacaaggcattttccataaaatgctttcctcttttcatccttaaagcgttccatcgataccgggtttccgttgtctacccctgcgataaagccattaccttgtactgtgaaattcactagattgtcagcatcagggcaaagatttcctttctcatccaacacctccacagtgacaaaacacaaatcttttccatcagcagtcagaatagaacgatcaggagtcagacgaatctctgcgggttttccggctgtgcagatttccttttccgccactaccttaccactctctcgtgcaatgaccttcaccgttcccggttcaaacttcacacgccaagctacatgcagattatcaaggtctttacgcttcactccttgcgactttccattcacaaacagttccacttcatcagcctgattatagtagcaccacatatcaatctcctgtcccggagtccagttccagtgcgggaaaaggtgcaacacctgcttatccgtccattccgactgatacaaatagtagacatctttcgggaaaccagccagatctacaataccaaagtacgaactacgcgcaggccatccataaggagtcggttccccgatataatcaaatcccgtccatacatattgcccgctgataaagtcgttgtccctgactaatttcaagctttcctcatgagtgtttccccaaggcacatgacagttttcataagatgaacaggcaaatgtggaatcggcaaaggatttgtcccaacgctcgggccagataaacatccggtcgctgggcatacggtaatatccgcgagtcatcaacgctgaattgctttcagtaatgataaacggcttgtccgggaaattagccggaacattgggaatatccttgttatgataattatagccaatcacatccagtacgccggaacggaataaatgattgccggaattcggttcattgcatccggcagtgataggacgggcaggatcaagcccttttacaaagcttaccagttttttcgtcagcaaagagttgacactctcctctccttctttggctaacatttcagaagaatgtccgaaatttaagatcagattggcctcttccagactcaacgtatccgctttggcatcactccattgttcgaggacttcattaccgatactccacataaagacagaaggatgattacggtcacgcaaaataaagtcattcaaatcgcgctcgtgccattcattgaagtaacgggcataatcatgtgccgtttttttcttccgccacatatcaaaagcctcatccatcacgataaatcccatacggtcacaaagatcaagcagttcgggtgcgggaggattatgggaacaacgtatgccgttacaccccatttctttcagaatttgcaattgccgttcaatggcacgtgtgttgactgccgctcccaaacagcccaggtcatgatgcatacacacaccattaatttttgtctgcctgccattcaacgtgaatcctttccgggcatcaaaactaaatgtgcgaataccaacaggagtagtatacctatccatacattcttcgtttcgcatcactttggtaaccagtgtatacagataaggagtatcaatatcccacagttgaggttgctttacagtcagttgctgggtaaaaacaacttccttaccggcttccgctttcccgctcgaccgggtttcagcaacttctctgccttcagcatcctgcaaggaagaacagacagtaacattttcgttcgtatcactttcattcacaagggtagtagcgagattcagtacagcctgtttttcgtcaactgacgaggttgtgacatacgttccccatccacccacatgtattgggccggtcttgcttagccacacattccggtaaatgccacaacctgaataccaccgtgaattaggttgctccgcattatccacacgtacagccagcacattcggttcatcccatttcagataaggagtcaggtcatagctgaaactaatatatccataaggacgtactcccaatgaaacaccattgataaatacctccgagttcatatatactccgtcaaactcaatgcgaaatatctttcctgcatccgctttgtctacactaaaggttttgcgataccaaccgactcctcccggaagtgcccctcctcctgtaccggaaggattttcctgactgaagtctccttcaatcgcccagtcgtggggcaaatccagtacacgccagtcattgtcggcaaaaccaggttgtgccgcttgcagcccgtctcccaaatgaaaacgccagtctgcattaaagtcggatcgctcccgcggagatacaaggggagaactgctacatgctcctaataacatcagacagcctcccaatgccaagcagctccccagtataaggcagccccccagcatcaaatattttagtttaccaatcatcatcaacggattatcattcagcttacagtttcaatgtctgctcgctgccattatacttcacagtcccccctttcgcgttcaaatcaaacggttgggctttctccttattcaccgtaactaccgtgaaagtacgctccttcagcatacccgggaactccccctgacgctcaccaatcactaaagtcttggtagcctcatcatacttcatcggtatcatggcatacatcccttgttcatagttataattcacaccttcatcttcgtataacgtaaactccccatccgctccctgataaatatacaaacggatgtgctccgccggtttttcatccgtatactgaatatcatctccgaacggaatgatagcgcctgcacgcacatacaacggaatacgctcataaggagcttctattacttttctctctcctccagcctggaatttgccggaatagaaatcataccagccctctgcttgagggaaataaatttcacgactgcggtcaccatagcgataaaccggagataccataaacgaaggaccgaacataaactggtcaccaatatcattcacttcagcatccgctgtgaaatccattaccaagggacgcatgattgtataatcatcaaaccaagtcatacctgccagcgaataaatatacggcatcatattataacgtaacttagtataatatacaaccgactgataagcaggatgcccttccggcgcaatctcccatatttcacggaaagggtattgtccgtgtgcacgatataaaggaacaaacgcaccgaattgataccagcgggtattcagctcacgccattctttataatcagcattttccgtctttgtcgcgttccattgtttctgtccggccacataacgattctctacacaaaaaccgccaatatccattgtccagtaaggtattccactcatggcaaaattcaatccggcagaaatctgtgccttcatgtcctcccaacgtgtaccgatatccccactccatgtagccgtggaataacgctgtaatccggcaaatcccgaacgggttaataagaacacccgtttgttattatctactccgcgctgaccgtcataaatgccttctgcattcatcagtgcatacgcattgaaaaattccgtagaggaacccaacgctgtaggtccgcacaaagctttccgatattccaagtcagtacagtcacgtacattcggttcgctggcatccatccaccaggcatcgatacccaacggataatagtgctcatacatctgtttccagaacagtttccgtgcatcgggatcatacgcatcataaaaaccataatggtaaccgggacctacccaatctttcaaactatctttaacagactgctgatacatccacccattctcgtcgaactccttgaaatgttcggtagtaacataaaacttaggccataccgagatcatcatacgggcatgcatagcatggatggaatcaaccattgctttcgggtccggaaaacgagctttatcaaactcatgacttccccaggcattctccggccaatgattccaatccagtacgatattatccaccggaattttacgatcacggaaacctttcagtgctcccaacatttcctcctgtgtattatacttctcacgactttgccagaaacccattgcccatttcggcataacgggagactttccggtcagcgaacgataaccgctaatcacgtcgtccatatcctcaccagccataaaataataatcgagctgcttggtcatttcactccaccacgactgtttcccctgttcttccggattaacaggtgtcaatgcacgcagtccgcaataagactgcccgccatcaggctgccactcgattttcaacggcacacgctttcctgcttccaaatgagcagcaaacttataactattaggattccatgcagtccgccaacgttccggcactaccggctcattgttcaaatagaccttaacatatcccgcataataaagaataaacttgaactctcccgtttgagcaggttctatctctccttcataagtgactttagcccccattaacggcagtttcttcggaagattctcaatcgttttcagattctcgaaatagatggagtcttcccggcggaccagagtttctccttttttcggcacataagtaccggttagcgccccttcctggcctgtcttatcataaagtttaaagatacgattcaactgggagtaatcattcggattaccgaaacgacagaaggaataactatccagcagtataccatagtttttattcgaaacaacaaatggaacagaaactttcgtattgtactggaacagttcctcgttcttacccttataattaaattcatccgcctgatgctgacctaatccgtaaaacgcttcatcttcgggagattcaaaaacctgacagaccgtatatcctttcgttccttccacttctatcggagtaaacgtctttcctcctcccttattttcctgcaggattaactctccgtttttatccgtaaaccacacctctccggtactagccagtacggatgctttcacttcttcagtagacactgtaatcgtatcgccattctgcacgacggcaaaagatgtttgttttttctgcgggacaacaatcagactttgcggatcggcaaacttgctgtcggcagtggcagaaacgtgaattaacttatctcccatcacctgaaggcgaaccaaacggggacctcctgtttctttgtgttgtactttgactatcacactatcacctgtcttctcgtagaccttattggaacatgctccaaaaagaagtcccggcaacaggcaatagaaaatgtttttcatattcataatcatacctacctttagggttcaacaatatattttctcatatcgcaaaagtaagtactataaatgaaaagttccccttctaatgttttatagaaggggaacttttaaacagtgaccggacgatatgtttttttcagaggtatcatttgttatttcccttctttttcctggtaaacggagggtaaaacaccaaattcatccttgaaataacggctgaaatatttaggattattgaagccacactgataggctatctccgacacattccgctggctttcacgcaataattgcgccgcccgcttcaggcggataacacgaataaattcgataggagtcttacccgttatctgtaatagttttttataaagatgtaccctactcatacccagttcattactcaactccttcaccgacaaatcacaccgggcgatgttttcctccacatacttgatggcgttctccaccaatttctcgtccatggaagtaatggcaatctcgctcggctcggggtcaatacgcgtctttatcttgtcagtccggtttctaccactcagttctatcagttttcgcatacgcagtatcaatatctccaccatgaaaggtttcgtcatgtagtcgtccgcaccgatggtcagtccctccactttgtcttccacagcctgcttggctgtaagcaatatcaccgggatgacactggtacgattatccgtcttcaccaagtgacacaactcgttaccatccatttcgggcatcatcacgtcactgacgatgatatccggcatcaggtctggtatcatcgaccaagcctcccggccgttggaagccgactgcacccggaaatacaagctcagactttctttcatgaactcaattaagtccccgttgtcatccacaatcagcgccactggcttttcccttttgtttccgtcttcttcctcgtccggaagttcatccaaagagatttcttcctcctccatgctagacaacagttcttcacgtttgcagtgcttgacaggcagttcgaccaaaaatacgctgcccgaaccgacattatccaccacccgtaccgatcctccatgcaacattacaaaatcacgcaccaaactcaagccaataccgcttcccgtagactgatgatgatccgatccctcctgttccacctgataaaaccgttcaaaaatccgttccttgtcttcattcttgatgccgatgcccgtatctgaaacctttatcaacaacctgtccggtttttcctgctgcatctccaaagccacatccacccgtcctccttccggagtaaacttgaaagcattggacaaaaggttcatcacagtcttacctatcttatcttcatcaaacaacatattcagggacttcatgccagcatagaatgtcagattcacatgcttcttctcggaaagcatcaggaaagaagcacaaatattgcgtacaaacgccacgatgtccccttcggataaagacaggtgcatacccgacatctcgttcttgcggaaatcgagtagctgattgaccaggttcaacaatcgcacggcattacggtgcatcaactgtaacttattctgcagtttctcatctgtcatttccttcatcataccctccaaaggggatataatcagcgtgagcggtgtgcgcagctcatgactgacattcgtaaagaagcggaatttcatctggttcaattcatctttcttctttgcatcctcttcgatctggcgtatcttgaacttattccgctctctacgccgcacggaatagaatacaaacaagataattccggcaagcaaaagcacgtaaagaacgtaagcccacggagtcatccagaaaggaggaagaatcactatcttcaagcaggcttcatcaatccctttatagccatcgctattgacagccctcaccctgagcgtatacgtgccgggagccagattggtatacgtcacacggtgcatatcagccgtactcgccagccagtcgtcattaaacccttccagtttatagaagtaaccggtcttttcgggtaacacataattgtccgaagcgaagaataccgtaaatacattctgcttataatccaaaacgatttcttccacctcattcagggctttcttcaatatcacgcggcccgcatattctccgcccacccttacatcctcattgaagagctggaatccggtaaacattactttgggaaaagtgcggttgtactttatattgtcgggatagaaacggtttaatccatacagcccgcctaccacgatttctcctgtatgcaaacgcttgagcgaacgctggttgaaatcacagctctgcaacccatccttgtcgttataggcatagcagtgaaaaacaggttgctccgtcttgctgtccacctgcaagaccacatttatcagttcgcctcctgtacttacccacatgtctttattgtcaccttccgtaatacccaatatcggcaactttgaaaaatctgtcttgatgggaacctcgtacagttcgtcccgcttcagatcgtaaacattgagcccctcacgcgtggccagccaaagcagcccgcgactgtcttcataaacctggttgataatcaaatgggaaaaaagcgccttaccggacttggtgccggtgacgtttgtaatcgtccgcatgttcagatccatgacagccaggcccgctgtcgtacccacatacagcatatgatcgcgcccaatacaaagagagaatatataatcggataccagatcagaatttccggtggtataggtcgtaaaagttcccgtttcaggattcagacactgcagccccttgcctaaggtaccgatccagatattgccttcagcatcttcggccaatgcccacacattgtcatatatcaacgaattgccacctctctcgtcggcacggtaatgcacaaaacggtttccgtcgtagcagttcagacctccccagaaagtacctgcccacaaacgctccttgctgtcgcgcaaaagacatacaatcacattactcgaaatggaacgggaatctgccgtatgcaaaaatactttccgctcatccgtcagcatattccaacgaatcaatccgcagtcgtttgtccccaaccagacaatgtttcccggcccgtcttccacgcaattgatatcgcctacatcggcaaaaccaaacttgaaactgctttcattataatacgatacacctttcttgtatgttcccgcccatagcgtaccggccgcatcggtatagagcgcagtcaccgtattgttcgagagcgtgcggtcatcattgggatcgttcatcagccgaagaaccttcccgtcctttcccagcacctcaatgccatcctgatcccgccctatccagatattgccatagttatcttgcgagacggcacgcacgatactgctataatttccgtttccgccggaacaggtctcccacgttttgcgagaaagatggtagatccacatgccttcaacaccatacatccatatacgttcatcatggtctacaaataaagtaaacacttcctccttttccttttcccaatggcgggcaatatcttcagtaacccatttcacttccagcttctccttatccaggcaagccaaagttccgttatagagagccaacaagatgccttcgctgcattccgctatatcggagacatccgcatttgacagtaaggtatcacttcccctaaccattgcggcacttctctttccttcctcaaaacaatagattccttttcccgggactttaatccaaaaagacatttcccgatcaatatagatagccgaaagctccccgtctatgccgatattctccatccaattttccatattgcggtcgaaagtgtcggaatctgaacgataaatggtatagcccgctcccgtacgcagccacagatttccggccgcatcttcctgaatgtcttcaatgtaattgtccagcaaagatgtttcgtcatccttctggctacggtatacacggatgtcgtaaccgtcataacgattcagtccggacgccgttccaaaccacatgaatccgcgtgaatccttatagatagcattaacctgattattggaaaggccgtcctttacttccagatgcttgaacatataatcgtgtggaaaaaccctaaagcatatcggccagacacacaaaataaacagtagtatttctttcatattattagagataaaagtctcattttattgcaaaaaaaccaaaaagctcacagaaaaacaagaaaagccgaagcttttatcgtgtgctccttgatttattccataaacacaaaggaacaaggagaagcatatcccttgcagaaagcttctccgaaaccaatcaaaaatattcaataagcttatatctctaaagcctcacattcaaaaacttattaaaataccttatgctgttgcttatttcaccatcagaaaggataattaccggctgcggctcccttcatgataccctcaatggcataatcttctttcgctgtccctgtagtacggtcgatgtcaccgcccgtctcccagtagaagggcagacaaccgtgggctttcgcttcccgggtgaccacctcattccagtaggcacggctcttgtcgtgcatctcctgattctcgcttacggtgcgcttcatggcactgtactcgcccaacacagcaggatagcccttgtccacaaaatacgtctttatcttagcaaactgttctttcacatactcctcttcgccccacgtggcgttgtgttccgatccggccacgatattgtccttgccccagtaccagaatatcttgccccagtcggcgtcattctccatcaggcagaagttatacgggtcgtagaagtgaaattccaccatcaaacgactctccaccacatccgtcggcatggcatagactcctgccacggcatcgcttattctagtggccggagcctgtactatcaggcagcgggtggcgttgttcccaccggtggcacggacggcgtccacaaatgcctgttcgtatttcatgatggtgcgaatgtcttcggcattcttaaattcgttattcgtactgctggtttcgttcatgcccaactcgttgcttccggcaaagagcaggtgttcatcgtagtcattcaacttggtagcaatctgcgtccatagggttttctgtttggtattcagcgcctcgctgtaaccgcccaagatatgatcttccaaccaaccaccgtcccagtggatattaagaatagcatacatattgtttgccacgcaataacctaccacttcactgacacggttcagccatgcggcatctatctgattcgtcgtttcattggagagatgagaattccaagcacaaggaatgcgcacggcgttgaagcccaaagctttcaatcccttgatgtaggcctcacttatccgcggatttccccaggcagtctcacctccggtagcctccaacgtattaccgatattgacaccggcataaatctttgccgccaaggttttggcatcgctttccatggaacccgacggaatctccggttctccggcagttttgggtttctgtttaaccaatacccgtcccaacgcaatgttgtcgctcttgatagtgactttcgcttcgcgcggtgtggtttcgacattggcagccatcgtagcataatagcttatacctttttccgccttttccgagattacacaccaagaagcgtcactactaacggtaacggctgcatcggcagtaagcaacaagatttccccctgaccttccacgggaacatcgaccgtaccggcgacaatatgtacagcaggagtgatcggatttctttcatcatcggaacatgcgataatcatacaaaagaaaaagaatgctggaaatacagcaacaaaattgaaacgtttaatggtattcatcatcttacttaaacttatggttaatctttgatgccaaaagtaatgaaaagcaacgagaatcaggttatcagatgttgctcgaaagggtatcatttgttttctatcgggatcaaaaagtaatctatggcagacatccgcacattccggagtcatttcagcttgcaagaaagggaaatatgtattatttttgtgtagatgcctgtgggcacaaaaccgctaataaccatttaaaacatttatgtaccgatgaaaaaaagtatactactcttcggactggctttcaatctctcttgtttcgcccaaaacggacaaggctatcaaaaccccattatccccggcttccatcccgatcccagcatttgccgggtggcggacgattattatttggtaaacagtagcttccagtacttccccggcgtaccgttgttccacagccgcgaccttgtgaactgggagcagataggccactgcctgacacgcccctcacaactgccgcttcattcctccagtgcctggggtggcatctatgcgcctaccattcgctacaacgacggcacgttctacatgattaccactaatgtgtccgacaaaggaaacttcattgtccacaccaccgacccgcacggcgagtggtccgaacctgtctggctaaagcaaggcggcatcgatccctccctctacttcgaggacggcaaatgctacttggtgagcaatcccgatgccggcatctggctttgcgagataaatccccggaccggagagcaactgacagaatccaaacgcatctggaacggtacgggcggacgacatcccgaaggaccgcacatctacaagaaagacggctggtactacctgctgatttcggaaggtggcacggaatacgggcacaaagtgacaatcgcccgcagccaaagcattgacgggccgtatgaaggcaaccctgccaatcctatcctaacccatattaacaagaatgcccagaacagtccgattcaaggtaccggacacgctgacttcgtgcaggcctccgacggaaactggtggatggtctgtctcgctttccgcccgcaaaccggctctcatcatctgttgggacgggaaactttcctcgctcctgtccgctgggatccaaatgcctggccggtggtgaacggagacggcaccatagccctgcaaatgaacgtgcccaccctgcccctgcaaccttttgccgaaaagcccgtccgcacgaagtttaaaagcggaaagctgggaaatgaatgggtacacatccgtaatcaccatccggagaactatactttcgtttccggaaaactacgtctaaaagccacttccgtcaatttggacaatagcacagaaagccccaccttcataggtcgccgacaagagcatatcgacttctgcgccaccacttccatgcagttgcagaaagctacggcgggcgatgaggccggactgacggtctatatgttcgaacctgcccactacgacctcttcgtgaagcaacttgccgacgggaagcaggccgtgacgctccgctatcgcttgggagcgttgtcccacacggagaaggaagtcattctgccacagaacaggaaagtacagcttcgagtgaaaggtggcagcgagttatacacctttgaatatgccactgacggaaagcatttccaagaattgggcaagatgaacacctgttacatcagcacagagacagcaggcggattcaccggaatcatgttaggcctgtatgccgcagccaatgacgatgcctctgaagcatctgcagattttgaatacttcgactatctgaagtagagtatcaaaagccacgacttgaaacaattataaaaaagaaaatccgggatgtttagaagcaccccggattttttctattgttcataggatccgtcaaccggtatctacagttaccattgcggaacggcaaacaggctgtgaatggtgaactccacttccataatgtttctgaaaccaagttccttgatgacatcaccttccggcgtaccgaaggcacaaccggtatccttcgtcttgccataacagttccaaagttccagacgatagctattgccgtcattagtatcgatcactttcgttgcgtcatagcccgtcactttagtaccatccaaatagagattatccaactcggcgtgcatcttcggaaaatattgaaagatgtcgtccacctgcacaaacgtcatgatagcacctgcggcatggtcggtcgactcatacttgatgtcgaaaataggattttcaacggaatattggaagttctcgtacttcacgttgaacatagcaccttggttattattccaatcaccgccccaagtcggattaatagagacgagtttcggggtataagcctttgccacatcggcatcggtaatgattgtacaggtaatctccagactgcctccgaagctgaaagtcggttcggaactaacattctgcgaatcactgaaagcgctgttcagcaccttgccttcagcagcgcccttcccccaaacattgaacaattcaatgcggtaattaccattattctcgatatctccatagaaaaagttgttagcattgaacttaatggcattgccatcgcatttcatttcgtcgatacggacaaacacgttagggtatcttgaaaccaatccttgaaaatcgagcgtaaataccatagcgtcactgcaagccccttcatatgtaaaagtatgctgtccgtccaacttagcaggatcgatctgtccgacaacggttccccacgttccgggctcaccgtttcccgcacagaggagcgttacaggaatcatcgcatccgcctcagccttgcgctggctgtaatagtttacagagtatgcataaccgtcaccgttgggcagggctatctgcaagccgtcacttgtcaaagtcaatatattcaacttaccgctctttccggctacccacgtatcggcacaaagcacattgatgtcaatgtcaatcaccttatcggcctcattaatggtatatctgccggtttcgtcagtggaaacaccctctccggtcagacggtgaatgttcactgttccgtcttcaaggaactccatgtaaccataatcctgaccgtaagtataacctatccatccgttgtccgtacccatttcccaatgaatctgctgctcaatattaggttgtccgttggaaacggtagcccagctatccgtatcgccccattgagtgaacggaccctcaaacacatgctgcttgccgtcctgcccgttatcaatgtaccatttaccataaagcaacgttttgtcaaatctcacattcttagccgtagataccggacggacagcaagcgcctgataaaccggagtcgtcgtacgtctatcggctcccgcattgaagtggtagctcatggcaaaccgggaatcggaactgttgatagaaccggacagataatagccttccatacctgctccctccgtaaccgcctgactgcgcgaacctgccgccggcaagaagatggagtttccgttgggaccagtaagtttatagccggacacaccgtctacttccgtccattctttggagcaaagggtgaaaagttcttcaaattccgcaatggtaggcatcgttacttttccttcaaacgccttgtttgcaacgtcacgagcagtcctgtaaacatcagcggaagcatattgtgccggatcaagactggtattgaatccggtcatatcaccgaatccgaacaaacctccgatttccgattcagtagaagcacccacattatattttgcccatttggtggaaaggccgagatcgaccaagtcgtcatcgaggctgaaagtctgggaagcagtcgtgaaggacttcacatcgccatagactaatccggcaccgagatccagataagccacataataataggtagtgccgggcatcaagccttccacatctaccgtatagctgtccttgggaacagtggcgacacgcacgcctgcacgaacgttttccgtgcctgccacacccgacaccataatgccgctttccgcatttgcagggaagtcggcaagcgatccggcaagcgtaatcctgttggcctccacatgggtggcgtcaccagtagtggctctagcattggtcagcaccaagcttttgacctcgccaatgtaggtaaccttaccttgcagggtgacgtatgcctggtaatagatggtctgattgacactgcccgctacggtagcggagaaatcctccccgcccgtagccaccaccttctccgtcaacgcatcggcaccctcaccatagttaaaaccggtggtgtatgcgctcgaagcctgtcctccgagccctgacaccgtcccatgcagaatggccgaagtagctgtcacatccgccgatcccgtcactaccgaattgtcggcaagcaacggctgtgtacttatggcataatcgtcatcgctgcatcccgccatgaaaacgcccacgacgagaaccattattccgaataatatcttgtttttcattctactaattcatttatgtgattactcaatagtcattgaaacaatttctacctgaacattggggcttccgtcttccaatgtttccacggtggcgttgcccttgttctgtatacctatgatgagacagcttgtcccgtcataagtcaccgtcgcaccggtagtattggtcacagtcaccgtctgggtcgcacccgaaaccatgtcaaagtttacggcatgttccagactgtagcaaccgtcttcccacgcgtttccgatgttgttgtccaaaatgaccgtcttgggagccgctccttcattccaggtgatgccgccaagcaccttatattggatggtgagtttctgattctttttcaatttcacctttgtgacatcgataggccattccacatctgaaacccacgggttatagaactggatgcgcaggcgttcgggattgccgtcaccgaagatgacctgtaccttactgttgtccaccttcacctcagttggtccggttgtccccgaagagactttcttgtaaagcaggttggctacgaggtaagtgttcaccactccgttctcgtccaccgattcgggaatgccgagagtcagtgcttcacctgcctctacgctcaatacattgaaagaggtgcccttcacaatgacagtacgctgatcgtgcgaagcggtaaggaaggtgatttccttatcaaaggttatcacgttgccggctatggtcatattgccgctcaagtctccgcattcgtacttatacgtaccgtcagaagctttgctcagaatcagttcaaagtcttccgtctcctcgcccggagcaggggcccaagtggtgttgtaagatccgcctgtcacgctttcccattcggcaacatcaggcgaaccgttccaccacaaccagtcgtaagggatttcagtattgaggttgaaggtcatctgttgacccacgtaagatacaccttcgatttcggtcgtgaagaggtctgtctgcaaattgtcgaatgacggcaatacgggttctaccttatttatcagtccgctttcttccttgggaatgcactcgcctgcggtttcaatcacttcttcggaaacgaagttccatacgatgtaccagttgccttcgtcattggtacgcttggtcactaattgcaggatgtaaggagttagttctataatctggatatcctgcgtatagttggagcaaacggcatcaaagcctgcgttgtgcatagaatagcagtcggtgaacgagatgaggggtttagtcttgtccgctagattcatattgaatttccccgtcatgttcgaacccgtgctggcccctttcgtaccgttctccccccgatacatggtagccacgcaaccaccggaagcatccatgctaaagagcatatacgaatccatgtaagggtcggtagctgaaatcagccagtcctgaaagccgggatcccaattgggtttccagttgcccgtaccgaagacgatatccttataaacagcatcggcctcttcctgttcagtataaccggcgccatcgccgtccgggtcgaaaggtgacaggtacattaccggaccggagcactgcccgataccgtagttggcgtcacaaggataccacttcttgctgacaccggcagccaatgtctcggcatcgggaagggcatcgcccgtcttgaaattctcgtccgccagaaggaaccacttctcatctcccaacagcgagaagtcgttctgccccaacgtgaaagaataaggctcgccataaacaatgccaccgggagtttcagctccaaaagtcacctcataagtacccgagaaaggcaattcgatagtgaggtcgctctcctgcgagcgtccttgaggagtaacccacaacggagtgcagccggagatgttcgatttgagatgtacctgatttcccgaaatggtgaccgtataggccgtaccttgcaccaaatcaccggatacgtaggtctttccacccatatcgtatttatcaggcgtacatgccgacagcatcaatatcaagccggcaatgagcgaatatatataacgattcaatttcatatcttactaattttaatatttttcatcaatagcccgaaccttccggaatttaccaacccggattctgcacaagcttgttgcccgaaagcgtgatttgcgtactcggaatctgcatcagtcctttctttgcggtgaagttgctttcggagaaagaagtagtggcctcgttgccgccaatcattaccttagcgccgttctgtgcggcggcaatggcacgtgcggcataggcgccatctttctcatagcgcatcaggtcccaatagtgcacgccctcaaaggccaactcaatggcacgttcgttgcggatgttctcaatgctgtaaggcaaggattcaccgggatatacgcgctgatgaaccagattcaacccccggttgttcccgttaagttcggaatgcatcagcaacacgtcggcatagcgcatgatggtgtagtcctgatagtaagtgatgttcatgtgtttctcgcccaactcaaatcctacctcttgacgtgttccatcggcaaagcacatcggtgcatacttgcgggtatagtagccggtgtattcataagaatcggcaatgtcggcatcgaaaccggcttcactgcaactccatacgcaggcactgaaacgcgggtctttggaatattgctccacaaaggcgggcgtcaccgagcaacctccccaaccgctggcaatgcatacacctgttgcgcatcggttgcgcggacctaaatagaccgagaaggtgttgccgtctccattaccattgtagtcagaagtactgttcatcttcaggttgagcacaatttccttggagagattgccctgaccagcctgccaagtagaaccatcgtaccatttgcctgcatacgtggttttccaggcatacgtgtcaccgcttgaagcatcggtggtgcaagccggcatccaaaagtcggcatagctgctttccagttcataaccgccataatctaccacatcgttgatggccgccaccgcttccgctttcgtacaagcgggatgttcttcgccatagtaaccggtataataaagataggcgcgagccatcagtgcttcagcagcatacttggtgatgcggccgtcgttggtgttacggtttaacaacggataggcatcggcaggaatatgctcggcgccatacttgaagtcgtcgaaaataagctgatagacatcttttgccggagaacggggaatgttctcttcggacggagcggtgagcaaaggcacgtcgccgaacaaacgaacgagatcgaaataaaggataccacgaagtgtgcgagcctcaccgataacacgtccttgcgcaccggtgtctccaccccagtctatgttgtcttcccgcgcgatgagctggttgcagcggaatatcgccttgtaatagtttatccagtccgtattgaagaggtcgttgtaagaaggggcgattcctaagtcgaactggtctatcacattattattcttggcatcggaaaggccgagaccggcaaaagcctgttcggaagcgaattccgccaccaaatacatgcccactccctcatcggagacagtgcgttgccagccgtcgtagcaacccactaatgccatttcggctgattcgaggttgctgtaagcggtttcggtattcaaggttacctttgaggaagtctcaaagaaatcatcgcacgaggtgaaggccgcagccgacagtgcgagtacccccatggctaatatatatttgttcatattacttttctttttcatggtttaaaacgcaagattaatacctacaataaaggtgcgcggatgcggatagtaacccatatctacgcccgacacccatgtttggttggtcgtaccgtccgcattctgcctattgccgtccgtaccgttgaacgatccgatttcagggtccataccgtcatacttggtcagcgtgaaaaggttctgcgcctgtacatagagccgcaatttggagatacctttccaagagataagacgtttgaagtcgtagcccaacgtaatgttctgcaggcggatgtaatcgccgtcttgcaggtagaggtcagaaaattgccagttgcccacatcgttgtaggtcacgcggggaatatagttgctggttccttcgcccgtccagcggttgagaatccggcggctgtagttggcttgcgaggaattcgggtcgcgataagactgggcgatttggaagcctgcggcaccggtagcattcaagctgaagtcgaagcctttatagcctaggttgaggttaaagccgaatacatgtttgggaagtccgttgcccaaatccaccttgtctttggcatcaatggagccatcgtggttcacgtccacatacttcacgtcacccggctgcacattgctctgataaatgccgttcccggctgcaatccagtcattgatttctttcgtgttctggaaaatgcctgctgtcttgaatccccagaagtagccgatggcatgaccattctcggcacgataaaactcttcagcattactgtatatctgattgatggcaccatggatgataccgtcttcggtaggaatactacctacttcattatgattgtatgcaaagttagcgcctacactataagtgaagttcttgcctatttggtcattccaagagagtcctatttcgatacccttgtttttcacgtcgccgccattaacgataggaccgtcggcacctgctgtagccaatacgggagcctgtaccagccagtctttggtattcttgatgtaaccatcggccgtaaacgagaggcgaccgttaaggaagcgggcatcgatacccacgttatactgttcggaagtctcccacttcacattttcattggcaagacggctagtataggaaccggtaacccaaccttcctgccctccggaagagccgaagttataattggtatttgtcgtggataccggagcaagatactgataacagttgatattagcgttacccacctgcccccaactggcacgcagcttcaagtattcgagccaggatttcgtcgatttcatgaaacgctcctctgaaagtgtccatccggcagatacggaggggaaatacccccatcggtttcctttggtaaacttggaagagccgtcggcacgcacggtagcgtttaccatatagcggtctttccatgtccagcctgcacgagcaaagaaggacaagcctcgggtagaatcgtaaggctttccttcgacagtcttattttccgtaccgttggtgttggcaagataggcatgatcccagtcgtcgaagccgggaataaggccagtattggaaccaccggaactgctaccgtcataagaggacaattcactgcctatcaaagcattcagatgatgctcttcgccaatgttgaaatcataggccagtgtattggtccataccatagacaacccgttgccatgactctggctcactttgcttgtggcgactgcgctctgcggggtaaactggtattccggcgtataagaacgatagtcggaagcaccgtagctgatgccgtagaccgtacggaacttcaagttcttgacaggttctacctgcacataaacattggcatccaacgaagcgttcttgctctggttataacggttcatcatcatcactccatacggattaccgtcattcacgttccagtcggaacctaccgtagagttgtaattgccgtcggcatcataaacggggataataggagaagccgagaatgcgctgcgcaggttgttattccaaatgtttccggtattcatgccgcgcgtgtctttatagacaaagcccacgtgctcaccgattgtcaccagtccgttccacattttgtgctcagaattggcacggaagttatacctcttataataagaaacatcagagccgccgatcagaccgtcctgaccggtgtaacctcccgaaatggcataagtggatgttttggaaccacccgtaaaggacaggctatggctggttgtcaaagcaccattatcaatggcctggtcaatccaatcagtgtcatgtacattgccgttggcatcgtaaatagagttgagtgaagcccaatctacccgggacatgcccgaattaaggcgggcctcatccatgatgttcatatactcggcggcattcagcacatggaacttacgcccgatcgtctgccagccagcaaagccgtcgtaagagattttgcaggaaccttccttaccgctcttggtggtgaccaacacgacaccattggcagcctgcgctccgtagatagcagccgaagctgcatctttcagcacgtcgatactttcgatatcggcaggattcagtgtggtaatgtcaccgcctacaccatctataagataaagaggttgcgaattacccaccgtacccaaaccgcggatagtgacactcatgctggcaccgggctgcccggaggtagaaacgatgttcacacccggtgtctgtccttgcagggccgacagcgggttggtggtattcagcttggcaatatcgtcgcctttcacctgaaccgtggcgccggtcacaagtttctttttctgcacaccgtaaccgatgacgactacttcgtccagaacctcgctgtcttctttcagtaccacattgatgacggaagacgtaccgaccttaacttcttgagactgatagccgacgtaagagaataccaacgtttgcccctgtccgacatttaccgaatagtgaccgttgatatctgtgatgctacccgttccgataacttctttcacccgcacgctgacaccaatcaacggctcgttatccatacccgccgtcaccgttcccgtgacggtctttttttgagaaggattagcctgaaggctgctgattgcaggcacgagcaatagcagtaccaatgcaacatggcataaccataaatactgattatgcactttttccaagaatgtttttctcattgtacatttttaagtggttaatatcaaagatttattgcgttccttaaatgattgcaaaacacacccgcaaatatagaaacgaaacaaaaaagtaggctcagaaattgttactaaagacatacaaattagttaatcctcatcataaaaatgttataaaaaagggtataatttgttttcaatttcattgagatatctttctaaaagcctattctatcttttttcagacacatctgtttcgtcacatttccccgatttccgcaagaagtcgctccactttccggtctgcgggtccgtcactccccaatgcttatagagaatagaatgtattttattggggcatgatttgtattcaattgcatttcgccctttcgggtgactgcaattcttcctacatttgtaatagaattaaagtctcactctaaaaatatcaactcatgaaaaacattaagaaaatggtattagtatcagcctttgccggtacttgtcttacgcctcatgcacagactgcctctcctgtcatcccgaccgatccggctattgaaactcatatccgggaatggcttcagaaaatgactctcgaacaaaagatcggtcagatgtgtgaaatcacgattgatgtggtatctgatcttgaaaccagtcgtaagaaaggattctgccttagcgaggcaatgctcgacacggttatcggtaaatataaagtaggttcactgttgaatgttcctttaggggtagcacagaaaaaggaaaagtgggcggaagccatcaaacagatacaggagaaatcgatgaaggagatcggtattccctgcatctatggggtagatcagattcatggaacgacctacacacaggacggaacgatgtttccgcaaggcatcaacatgggagccactttcaaccgggaactgacccgaaaaggtgctgaaatctctgcttatgaaaccaaggctggctgcatcccctggacgtttgctccggtagtcgacttaggacgtgatccgcgctgggcacgtatgtgggaaaattatggtgaagattgttatgtaaatgcagaaatgggcgtatcggccgtgaagggttttcagggagagaacccgaaccgtatcggagaataccatgtagccgcatgcatgaagcactacatgggctatggtgtacctgtctccggtaaagaccgtactccgtcttccatctcacgcagcgatatgcgtgaaaaacatttcgctcctttccttgctgccgttcgtcagggtgcattgagcgtgatggtgaattccggcgttgacaacggactaccttttcacgctaaccgtgaattactgaccgaatggctgaaagaagacctgaactgggacggtctgattgtaacagactgggcggacattaacaatctctgtacccgggatcacattgctgccaccaagaaagaagctatcaagattgccatcaatgccggaatcgacatgtcgatggttccttatgaagtgagtttctgcgattatctgaaagagttggttgaagaaggagaggtatctatggagcgtatcgacgatgcagtagcccgtgtgttgcgtctgaaatatcgcctgggattatttgacaatccgtattgggacattaagaagtatgacaagttcggttctaaggaatttgcagccgttgccctccaggctgccgaggaatcggaagtgttattgaagaatgacgcccataccctgccgatagcgaaaggcaaaaagattctgctgaccggtccgaacgcaaactccatgcgttgtctgaacggcggatggtcgtatagctggcagggacacgttgccgatgaatatgcgcaggcatatcataccatctacgaggctttgtgtgagaaatacggaaaagagaatattatctacgaaccgagagtgacctatgctccttacaagaacgataattggtgggaagaaaacaaaccggaaattgaaaaaccggtggcagcggcagcacaagcggatattatcatcgcctgcatcggcgaaaactcttattgcgaaactccgggcaacctgacggatcttaccttatcggaaaaccagcgcaatctggtaaaagctctggccgctacgggcaaacctatcgttttggttctgaatcagggacgcccgcgtattatcaacgatatagaacctttggcaaaagctgttgtcaacatcatgctgccaagcaactatggtggagacgcacttgcaaacttattggcaggcgacgccaacttcagtggaaagatgccattcacttatccacgacttatcaacgctttggcaacttatgacttcaagccttgcgaaaacatagggcaaatgggaggcaactacaactatgactcggtgatggatattcaatggccgttcggtttcggattaagctatacgaattacgaatacagcaacttaaaagtaaataaaccgacttttaatgctgacgacgaactgatattcacggttgacgtaaccaacacgggcaaagttgccggaaaagagagtgtgttattgttctctaaggacttagtggcaagcagcacaccggacaatatccgtttacgaaacttcgaaaaggtttctctgaaaccgggagaaacaaagacggttacgctgaaactgaaaggaagcgacttggcatttgtgggatatgacggtaagtggagactggaaaaaggagatttcaagattaaatgtggtgaccaatggatggatattgtatgcgatcagacaaaagtatggaatactccgaataagaatacggcccacaaataaacctctttttagatatttctataaaaacatcttcatatagaatcttctttttatataaaaatacacattcctctatcacctatcaccgccagtaatcaaaagccttattcatcgaggtttccgacggtgataggttgtttctgaacctatcaccacatctgtcacctatcaccgcaaaaagcactactttcatcacatttttgcaaaggcaacctgaacagctatgacttagagagctattccttttttttcttcacagaagtcatcaccaatttagtatgcagttctttaatctcacataaatcgaacctttcctgtatatacacatacatgatgaccaaacggatgagttctttattcggacatgagaattcatctttagatagtccgtctatcactatatccaataaacagagagaacactgcaattcagcttttggcaatcggtctacattttcaatctgtgcaaagctaggccagttttctttcataaaactaagtttgtcgacggaacattctaaatcgcgcttcatcaggcaggaacgggaacaagtaaggttactcataactatcattttttaattatgtgtttccgtatgccaataaaaaaggcgcggaaactattactgtactatcctccgacggctctggtaagcctacacctgaataataagcaatagctccacgcccgttgaggtatataacaaatatatatacaacatggacgtggagaccggtcgcttattatctgcaggtgttaaatttaccagatttacggagcagataataaaaacactatctccaatacaaaacaaacatatcctcttcctgaagatacgctacaaatataactatattttcagataatgtcactgttatcacagtaaaatagtttaattctccccttgccctacatctatcaaatagaacaaggcatataaatacctacaacaagtaggaatactttgcttttctccctgatatagtttatctttgctaccgatatagttacttcttcacggccgtgacgaattcctaccacggccgtggaaagatcctaccacagccatgaagagatctcaccacggccgtgggagattaatgataaaggcactgtaaagcaactatacctacactttaatccaagaataaaggcaggacacttatataaagccgcttgataacaaacaaacaacagctatataacaacaaatcccccctaagtccaaagattgattagttttacaacaaagaaaaacaacgcccttataggactaacaacggcaaattataaatacgtagtcatataaggcaaaaacaagtaaataatggcaatacaatttgaattgtacaagactccccgtcccaaggacgaggaaggtaaggaaatgtatcacgcacgtgtagtcaacttccaacacattgacacagactatctggcaaaagaaatccagatagcaacctctttgactgaaggagatgtgaagtctgttctcgaatctctaagtcatttcatgggagatcgtcttcgggaagggcaaagcgtccacttggatggcatcggctatttccagattaagttgaatagtaaagaacctatcacctcgcccaaacaaaaagcgaatcagatgaaactcaaagccaacattagtttcaaagcggacgccaaattgaaaaggtctgttagtgttgttcatatggaacggagcaaactaagacgccactctgcttcccgctcgaatgatgaaatagacaaactgctaacaagctatttcagcaataatccggtattgacccgtggcgattttcaaggactatgcaatttcacttctaccactgcttcccgtcatatcaaacggctaaaagaggagaaaaaactgaagaatatcaattcttattataatccgatttatgtgccgatgccgggatattacggtaaggaggaaataaagacgaatcaagggtacaatatagaaaaggaaaattaaaagaagcattcagttgttgcaaattttgcgacaactgaatgctcttactatttctacctaactgatccagaaattgcacaaattgattattacccacgtttcattcatttctttccactttccaatttccttcctttgttatttcaattttcaatttattcttattggcaagagtaatccaaacattactttgatgagtagcatccgtttgagcagaaatagctttcgctatgtcttcagctttccataaagcagtgtgaggaacaataatagttacgaacgtaacagcagaaccggggattaccttttgtttggcaaaagttgtaacaggcttgactgtatactcctgttgttgcgccccaaaatgccgccccttctgttcctcaaagtaaactaatagttgatttgtttcaatatctttccccgaacgatctttccactttttattctctcctgtggaattgaaccaattcttaccgcttttatccaacgaataaagttgccataaactgccggcggtataaccttccgttcctgccccaggcaataaatgatcctgtataacaagtattccttcttttgtgagcaccatattccgttgtaggacagatccatccacacattggtcatccaacacaattcgtccataagaatctccctcccgcgtttctgccatagcttcttttactatgtttggattaaacaatgttcctactttctcgtgaatatattcctcacccggaagagaaaccttattataggcgcgtatcataaaatctaataccgatttcttcgctccgctttttgccgtatgcttccaatcacaaccaatataccgataatcattcagactaaaatctgcggctacatccagattcacaaaacagacattcttgtccggaagaacaactttcacagcttttccttctttacccaagtcaaccaaagtcacgtttttactccagttctctaacgtgctacagtcatgcaacaacctgtttcctgcctttccaatcaaccggacattcttaatataaatctcttcacccggttctccctgaaagcggaatgtcatctttctcatcccccgcattgcagtatcaccggaaatctccgtagactgactgaaatcaacacaatctgtaaaccagctattagtgaacaaccggctgcccttctcatcaaacgggaatccactcccgttctctttcatcagaacgacagtattgccatgacgcacatcggtagcatgcctctgtacaccatgaaacagagggttatcatccacttcaaagtaattaatcgtaccacgcagatttggatgctgatgagtgccggatgcatacaagtcactcattataaacggggttcccgcttcagaagaggctcgcaatagcagctggtcgggtatatccgtttttcccttccggtttgtacgggtggtgaccagagaagtacgaacaggagaatctgatttttcaaaaaaggtaggcaacagggctacctctgcaagagcagcccaatcacaggcctgccgaagattccatcccggtttgaagtacttaatatctaaattagggtatccgatagtaaataacttccaggcagcttttcgaaaagaagcatcaccggtcaggcgtgccatcttttcaaataccagtatccagttgttataggcaaagaaataatcatctccatattcgggcatataaccgctgggagcctgttggtcacgatagcgttcgaaccaccgtcttatttccggagtcttcaacaacgccactttatcactctcaatggcaatattgatgatgtcattcaaatgaatggaagcatagagagtcgcagtttcatctacgtctttattacgataccaaaagtgccacatcttatcaacatactctttccaatgggaaacgcccggagcatcggggaacaaattacacatccgtacaaaccccaatgcacgttcctgtccctgattattatcaattacaaaatcaggatcaaagtgaagatcggcaaaacgaatcatcacttcatcagctcccattggcagacggtcattgtcctgcaatatttcataggccagcgccaagttctgcaatgcaaagaaatcatccttgccgtgcatcagtttctcatttttcttccattcacgaatggcattcccaaacacctgctctgacatatccaggtaacgcttctcgtgcgttgccttatagaaaacagcagatgccgacatcagattagtcacccaacggacatttttagcccttatttcttttacgatccgttcctcactgtatttctgcgtcagcaaatcaaaagctgcagaagccttagggagaaaatccgcccgacataactcctgtgcataaacattacataccagcaataatccgataagccaaaaacaagatttcagtttcataaccttcatagccgatctattaattattcacgaatttataaactctccattccgaaagaccgcacacagcaaagatgtccgtgcagcaaagaatagattaaaactattctaactgtaagttttctgttcctgttgccgtatggaattgcacactattactacccgccttttgttgcatataatcacttttggatatgtattcagtatttaaatccacagccttgccgttgaccttatattgtccgttatatgacatttccggtgaaaagaaagtcagttccaatacatccccttgaatattggtgtaagatatggacggggtatcactcgtttcatagtcagcagaaagctgaagttttacttttgcagcaatgtcaccggcaaactttttcaattcagcatccatatcaccttgagcatctttgtatcgttcagtaatctctgttgtttccaacacccaagagcctctacggcggttaacatctttaagcgtcagtatatggtgatctttgataccatacttattatcttgcaagccgaaatcccagtcttcaggagtagcaaaggcaaacatcatcgaaccggtatggcataacacccaccgcataccattaatttctctaatcattttcgttttaatccctttacgagtgaaaggcacatacatctgatagaacttaggttggtccatataatcctccgccacattatacaccccgatagcacttctttcgtaccctaacaccctgtgataaggattttccccatatcccggtttatttgataccgtctgatagctttgcggacgttcgggattatcatggcacacactgaatacggaggcttcaggcagatcagactgccacaccaaatgcagatttttagtttccttaaaagcataagtatactggaaacctttcaacttattagaaaaagcctctatcgtttgtgtggataagccatagtttttactttgatacgtatatctgcaacagaaatgatcgtcgtttatacgcaaagcctcaaaatgataggggtattgcttaccggcattgagcgactgaaggtaagggagaggtttgacattacgttggtaagccatccagaaattgaaacaggcaaaattatctttaccggcatccaaacgaatcttacgctcattctgtcctccgtaaaacagccaggccaactgcccaatctgcacgtctacactcaaatttccggtacataaattcgcccagcctttacaacgggaaggattggcacaataaagtccctgattccaaggtaacagcagctgtgccaccatgtgttgataaatcgtcgcagcggtttttcgaatttcttcatcccggctaaattctgcaagcatcctcacatactgaagatttattcccaaataagtaaaagcgtcggcttcagggcagttgtctgtgaagaaagatttcaaggttttcagtattctgccatgcaaatagctttttagctgggaagaagtttgcccgtccgcatccacaaaatcagaccattcttcagcacaaaggaaaccacttgcctgtcgcatcatcctcatattcagcgtacctttatcagttgcatacttccctaatttcatgaaatcctttatcttcttctgcaactgttccgacatccgggtcttcgtaagcatatatccatgcatagtagcatgcacaaagaactccaaatcggaatctgaatgataaacctcatcgatatgttccaactgatattgatagatttcaatcagtttggccgttgcttccgccgtttcatgattactccacagtctggcataatagaacggagccagatacttgatactgtaacctttacccggagacacccggagcatacagtcgataagcgactttcccctttcttcataagtagtcccccgcataaaaggaccagcctcttctacctgcccttcctccggagttgaaggcaaaggctgattactgttttccctggcatcgctatcattacaagccgaagtgcagaagaacaacaacagagagagaactatatattgaaaaactttcggtttcatctattcttttattatcaggttaattaatatgtatactaacaggatgatttaaataatcggcatacgtatcgaccagacgaataaattcctcacgtttagagaaatcatccactcctagttcccagccggcatacacctgataacgatatccattattacccggtttcagtttggcacaccatgttttaagaattccgtttccttcatcgggtgcatggaacgtttccactaattgatccttagggattagcaatgccatacccaattcgtaatccttattcaccgtctgtttatcatgtgtaatcatggaaacccattttcctgcatactgcttctctacaaattccttcgtattgttattggcaacaagtcctgttaccaataccgcattctccggaagcggcgaagtacgtatttcttcctcatatccgtttttacctgcccagatagtgaccgtttcatgaacatcgacttttgttcccaacacatcccatctcgtaaaatccaaccggaagacggaacgtacaggtccttccgctatcacctcaaaatgagaagaatcaatgatgtccactgtatctttttgctccactcccatccgcaacagcgtatcctgcaactggatagcaattcctcccagtccgaaagaattcgccacacttaaaatatcacatccccattctctcaacacctgataggtattgtcaggatatccatctgcacggagacctaccgtatcaagtaccatttcagaaactctcttaccaaataaatcgcgacagttcctaccgtcaaaataatggcggaatcccactttgtcattctcccatgccggtccatccatctgataaggataattgaccgaacggggcagattctgctttccatgcgtatcggaggataattcttccacctgtcccggagaagtcatcttcccatagcggatattggtacgtcgttcaaaaaccggataatcggcagccgacatccagtccagcaacagctctaccgtttcatgaccgcccaaggtatatacaaaagccagctcatcccataaaccatcctgatccatatcgtccacctgacaaggaatatatgttccatccgctttcttcaccacaggaagtaattcgtctccaactgccctcaactccatacgcgaaagtctgaagctttcatccacacgctcttcatttataggattcttcaacacaatagaggtagcgggcttctccttgcaagaagaaagaacgaacaccaacgcccataaaaaatatattattctcattttatttctgttattttagaccctaccgggcattttaaccggacataaaccggcacgttattaatcaggataatacttctccggcgacatattcgcagacatatatggaggcatccagaaagctgattgacgtttgaacttcaatgtaacagccggataccaattcttccacgaagcgggatctgtattttcaacaggcgacaaggctccttcgccatttccgttgacagaggccactgcatattcatacaccatcaaaccgtgcctgtcctgcaagcggttatccaatgaaccgggcattgcaaatgccttacaaactcctgctgctgtcttatcaacaaaacaatttgctttgccttcatatatcagacgaaattcctgttccccctttaccctccgatacaaacggtatttctgtactccgagcacttttccccatgatatttccacctggttatcatccagtttcatccagattccttccggataatgaggagcctcaccggtaacataaaccggatattccttggcggatgaagctgctcttttgccattcatagcaacagcacggatatgtattttatctttatatccatctttagacagcttataaggagaatgaagagttgtcgtcactgtttcccaatgttttccaccatccacagaaacttccagccggacgctcttcaaccggttcggattctgccagtaaatcaagaaatgattcttctcatattccacatctgtgatttcagcaggcaatggcattgcttttccggctgtgtattccagactatgttgtcccgccggaagggttagcactgcctgaccggctttcacacggacaggttgagccactccatctatataaaaagtccctttgggcgtcactccggtaagagtgacctttgttactttcagagccttaaacgtaccgaataaagtttcgtcaacggcacgagtcaaagcaatcgctgcctcatccccggcttccatcgacagacctaacccgtctgcagcaatcttagtacctcgaatcaaagccaactgcagactgccgtctttcatccgtcgaatgactcctgctttgccttcaaaatcttcctgttccgtaagatattccaaggtttttcctgcacgaaataccaaatcctcactttggggagcacgaataccgatgactccttcaggataagccccttcctttgccggaataaaatcagctacctcttcagttcccaataaaggaatatttttcaattttccacgcaacggaaccacttctccctttttatgcgaaaccaacgtaagcagcgaaccaaacgcatcccgatagaagcctctggaagtagcagtttctgccacagtccaatggtcatcacgtgcttttttagataggaaagtaatttggggatattcaaatcctttcccggtgaaccaggaaaaacgatgtgccgctctccaattagttcctgtttcatcaaaaatcaaatagtagtccgtacctaccagcaaaatgctacgcgactgatattcaggccaactatataaatcttttccggtggcaggcagtaactccgcaaactgtgcaacacccaagtcatacaagggagcagtcaactcattcatgccgatggtacggaattccccgttcttcatgacaccgaagttagtgacaccatccagattattggtgatgtgatctccggcattctcattctcatgccctgtaaaaatctgtccctgcgcataaaagtaaataccaccggaatttccctgtgcctgatttccccaacgataattgggtcccttgtccacctgctccaaatgaatggataattcttccggcgtatcgactcccgcacgaagcacaatgccgtgtcccacgtatttacagcttttcagatgaggatttgtaccccggttatctactgtatgaattcgcttatacacttcagcccagtcagagtctttcagtttatgctctaactctttgccaaatgttcctgcccagaatatattctctgctactatcggatcataattaaacaaccattcacccaattcgaacaatgaactgggacgatctacggttgttcccccaccatgcgcaccatgagcgggatattgacgggtgaaagatttttcatccaaggcatctcccggcctccatccttccggatagcccggctgtgctccttccacatttctataattatacacgggagcggtcagcatatccaccagccattttcccctctccgccatatacgaactggcaaaacggtttttcccgtcatataattcacctgcaatgttggaatgccctgtcggacgaagataagcccaattataaacacccaggctttctacccaacgtccgcctttaccttcgaaagtccttacttcgggacgtgtataaaacactccgtatatctccagacatttctcgaaaaagtccccccattcttttgccatcggatgctctggaaacaaataggctgtctgcatcgggacacaccaaccatcagcggccatattagcggtacctgccaatgaattccggatggcattcatctcttcaagcatattcacgtagccaccgagaataaacaaagcgttcactgttttccgttgcttttccgtcaaactccgggcatgaaacaagtatccttctaccaacttggaatataccggacgatgttctatcgaatgaatccccggataaaaattcagtcccatcggataataagcaaaagcggacgaaatcatattctgatagaaactttccgctgtctgtccggtatgatcctttgtaaacaggttctccggttgttttttgtcattagcatattcaagttcccaatcttttatcctatccaggcttaaagaagcatattgctgatgaagcatctgtgtataccgatacgacaaaaactctgatttatgcgcgcctccggctttggctatctcatcgatacgtttattaaaaccggccactgctttccgtccctgttcttcggagaaaaaggcgattgccgtagagcggcttccatcgacaagcggatatttaaagtatagtttgttatcatcataccggaaataaatactcaaatcaggagtaggctgccagataccatactgccggtcatcccacttttgatgatcgtaaacaaagacgcccaattcatccgcattctttccctcttcccaaaaagacatgacaggaggctgttccctgaccgaatttccaccaaacggggaaatgcggaagatcatctctttagaagggtcttcgatccatcccattcctgtccagtgcgggtcttcctgagaatagctggtatgtacaggcgtatcaatacctatccattgtgaagccttgtcgaacacgcggtcccattgtgtaccgaagcgtttgaccggagcaaaattgtcccaacacatatccagatatacccggtcttcttttgataacccgttcatctcttcttccaatatgacaaacggatatccttgtaccacctttatccatgcagtatacgtagcgtttcctgccagatagtacttcacctgatatttcacaaacagttcaccgacctccaccggaagcgtttcaatccgttctacattcttacggtgggcatacaacctattattccctatcttccggtcgcctttctgcacagacaacaccggagccggagcttttccggcttttacagactgtgatgcgggaatgtacacagtcatatctttattacctattgaaaactgtccgtcttctgataccactgctaaagggttgtcgacagtaaccggcttccgcccggttgcgaccagttcatacgcatatttccccccctgtggcaatgcggcaaagaaactgactctggcgcgttgcaagaatccgttttttaccactttctccgataactgaaaaggaacaggtacgccttggctcttatccgttaacgatagcatttcttcttttactcctccatcaaataccactacataacttatcaatgtacgtggccagttatatgtagcaaggtcaatcacatcctgtttttcgaacaagactggttgcccggcgaccatacggacctgtgcctgtatgcacgaagcaactattatcaggaaaaagaatatgatacgtgttttcatggatttttttgtttacttatttgttttaaaatctgtcaccagagcataagcacaccaaagtacgggtgcctgtccgtgaagatcacctgtcaatgccaaacgattgatatagtgctcacgactgttttttatcatcgtgccttcgcataccgccttcacatcacccgctttatcaatatagctacataaagcaatccatcctttgcgggcaacttcgccatactctttcgcatccagccaacctttttttactcctacaatcatggcatacgtaaacattgcacttcctgatgtttcttcccacaactccggatcgtctaccagctgtctccacattcctttttcattctgtgtctctttcagcgttttcatcattttcagataagcagccattatttccgcataatccggattcgtttccggcaagatacgtaacaattctgccatacccacagccatccagccgttggctcttccccaacaataaggagcagaaggagcatgatagaacaaaccgttgtccaactggagggagtccagatacactaccatttcacgggcagcacgggtaatatatttcatatcctgcgtaacccggtaggcttgcgcctgaacggctgttatcataaacatatcatccatccacaaacgggtttgccaggaatatcctttgtcggcccatgctttttcttcttcggttagttcttgcgttgcaggtgcatcccactgtgtatctgcatatttcatacccattgccagatacttttcatctttagtctgcatatataattccagaggaacagcaccaaacacattattatccacatgattggcttgcggttgcagataagcctctgtcgtgaagagaggttggaagcgcgcttccaagcgttcctccaagcctctgttttttgttgcctgcgcgaaccacaatccacccaaccaagtgcatacatccggataagtgatttgtgtacgcggttcgtctacacgtagcggactgccatactgcgaatgccattgctccagaaaacgatcggctatcttgtttccaaccgtcaccggatcagcttctgccggaaaatccgtcaacaaatagtcagcctctttatgccctctaaatgtgaaagcacaaatcaccgctaccccgacaaacacgatccctattataccatacttcttcattactttacctattaatattcaataccttaaaacaaacacttattgtacattctccaatttaggatgtactaacctgaaaccaatcaacttattacgtttatctacgggaaaggcagcacgggcagaaacccggcaagcactcgtatttgtattccatcctccaccacgacagatccgtttttgaggcacatccgacggcaatgcgtccggacctaccggatctacctgatcttcaccactatattcgtcgtaccagtcgaggcagacttccgctacattgccggacatatcataaagtcctaattcgtttggtaatttttttcctacttcttccggccagaactgcataccagtctgtccttccggcaaacggtaacaattggaaagattgtagcccacttcatcaaaattattacttccggcataaaccgttgaagttcttttcctgcctccacgagccgcaaactcccattgcgcctccgtaggtaaggtaaaatgtaatcctgttatctcattcaatttattacagaatgtctgcatttcagagaaaagacgattatccatcggcaaccgggtagtagcaagatctttccatgagaaattctcccatttacccattacgtatgaatacatttcctgtgttacctcaaacctgcaaatatagaaatcgctcacagttactttatgtaccggaagttcgtcaatatgcacaccttctccctgttctgccgtagctcccatcaggaacgtacccccattgacaaatatcatatcttctttcaggaatttctcaaaaaacttcacacgttccggacgaataaccgacgcccatgtatctcccggatctaacggatagtatccatccaggccagtattcttgttcgaagtgacccggggaatcttactggtatttatggttgcggcatcaaagagggaaggaccttcttcaaccggttccgaactgaagtaggaatcacccggctctaccggacgtgaaggattgtcatattcatcattatcactgcaagaggtccctgccataaccagcacagcacccaacatcatatatctcaatgtttttatcatcatagctttctttttttgtgttaaccaacgattaataaccatcattctgccacataatatccttatttccataagctaatatatccgacagaggaataggcgccaatttattatatgacttcattgcatacgtaggctgttcggtcgtttcattataaccttcgtctaccagggcaaagtgtgttgccatcgcctcttctgctaaatcccaacgaatcaagtccggccagcggattccttcgaaagagaattctacaaaacgctctttaacgagatagtctaataccgcttgtttatcggcaaaatcacttgacaatttagcagacagacctgctctctttcttacgtcattgataattggcaatatatcggtagatagataagtagcataatccaattcgttcagtgcttccgcatacatcaacttaacatccgtataacgcaggataggaatattatttccccattcgtcaactgccgtcggcgcattcttagtggctcttaagaacttccgcaccacatatacatcggcctgcggagcgctcttgtcaagatacaggttattgactattgtcaagtctcttctcttatctcctgtttcatacactccgtcgcccgcaatggacatggaagcacggatggagctggaagcaccattgaacgtaatgccgttcaacttagcatagtcccctttctctttattcagcgtagaaggaatgaaccaaccactaaaactttgacttaatcccaaagccttaccagtagtaccacccagatattgaacttcccaaacccgttctttaccattattatattcgtcactgaaacaatcttcatatttaccagccagttcataaagagtgccttcctgttcaatgacttttcccaaatattctgccgccttcgtgtaattatgcatatacatataagtacgtcccagcataccggcagcagcatatttcgtcacccgtcctgcctcactgcttgcccaactgtcaggcagcctgttaaacgcatcttcaaaatcagaaatcgcctgtttgtaagtatcctcctgactggaacgtgctaccttatacacttcttcacgagaaatttccttagtaatcaacggagcaccaccccaacaccaggcaaactgaagataagccagtccgcgcaatgcataagcctctccggtaatatatgctttacgatcttcatcggtaaaaaccactgcatctatcctgcttaataattgattgcaacgaaacaccagtgtccaccaagccgaccagggctttgaccatttgctctccatcggggtatccatgaaacgtcctatcggggtagagttacgaacctcgtcggcacgagtgacaattgcttccatataattcttattatagatagtctgcaattgtgcataacaaccattaatcgccgtttcaaaatcctgcggcgttttataatagttctggtcagtataaatagagggttgctccacatccagatatccttcacaggaagatagtgcgaacagacaacttatacttactattaatttataaaatgatttcataatggcaatagattaaaatgttaagttaactccgaatatatactttctcgactgcggataagtggtataatccgcaccacgcaccatcggattatcgggcgaatagctatttacatccggattaccgatataatctgtaaacgtatacaggttttctgccgtcacatagactttagctgcctgaatatgagattttctcaaccatttcttaggcaatttataagtcaggctgatgttctgtatccgcaagaaagaagcattataaatagccatgtctgtcatgtgcatttgaccgtccttattaagaggagagttgttgccaagtccgtaaggtaatggagtcttaccatcccaggacatgtctactcccagacttgtcggtatcggatttcctccggcatattcttctttataagcatgtagccatcttttcaatccattgtaatttccacgtcccgtatccaaactacgaccagccagataaagcaccttaccaccgatttgtccacgaaggaatacacttaattccaagttcttataagagaaacgattggtgaatccgtatgtcagatccggatcattcgatccataaggaaccatatcgtcggaattgatttccccattaccgtccatatctacatatttcacatttccgggaatctggttggtcaggacaggaacacgaggacgggatttgtcatacttaccatcaggaccaagttcaaagtcgtcgtttgttaacaaaccatccgtacggtaaacatagaattgtgaaatcggacctcccacctttgtgataaaacgagcatcataggcttctgtaattacattatcatttcctcccatatcaagcaccttattcttattggttgccagattgagcgagcttgaccatttaaatgctttagtatgtacattgactgtcgtcaggtctatctcccatcctttgttttcaatagatgcaagattggtttttactgtactgaaaccggtcgcagcaggcaacttcgtagaataaagcaaatcatctgtcttatttatataatagtctacattcaactgtacacgattattgaataaagagaggtcaaaaccaatatcaaatgctttggttgtctcccatttaagtttgtcattggctatattctttgcatacacacccacttgtgaagttcctccatacacggtgttagtcacatcataattaggaatataatcggcagtaccaatacggtcgttaccggacataccccaggaagcacgtagtttcaacaggttgataactttgatatctttcataaattcctcaccactgatcttccatccggctgatacggacgggaaaacagcccaacgatttcccggaccgaaacgagaagaaccatcacggcgcactgatgctgaagccagatatttatctgcataattatagttcacacgtccgaaaagcgatgaagtacgaacaatggttcttgaactgctggcttccgtaggggtagcacccatattgagagtcggtacactttccagcggatagtccattgctcccaaacttgtcctgaattcattacgttcgtcaatactttgccccaacagaatctctaaagcatgcttcttattcagtgttgtgttataagtcaacgtattctgaataccggtacggcttatgctaagagtagaggtagttccttgcgtagtcgagccattattgggctgtacatttgccggaaggaagtactcatcaattctcatgtccgagttatagctgaacaatgttttgaaagtcaatccttttatgatttttgcctccgcccacaaagaggtattgaaggttttcttttccctcttatctactactgacatcaatctttcgtaagggttcacgttattacggtagcttgcattgaatccatattcacgggtattttcatccaagccaatgataggaggcatgagcaatgcattcattatctgtttatcctttccttcagactctcctttatcctggtgagaaatagtaggggcaaacgtagcgccagccttgatatatctattcagatctaccgaagcattcaaacggaagttgaaacgttcgaaacctgtatttttaacaataccttcctgattcaaataaccggcagaaagatagatagaatatttctttcctttactggaaacagatacctggtgattatgagtcagggcattttgcataatctgatcaatccagtcggtagtcggaatgtcatttctaaacgtccagtcggctacatctgaattaggattcaccaaccattgttcgttgatctgatcgccggaggatcttttcttattaggaacatacatactattcgttcctcctttattcaaatacttggcattggtataccatatattatatgccagccattcttttgctgtcatcatttcgggtaatcccaccgcattttgtgtaccaatgtaggattcccaggtaatcaccggtttagacccacttgcctgcttggtttcaatcagcacaactcccgccgaacctctggctccataaatagaggtagcggcagcatccttcaatacctgaatagaagctacatctgacggatttacatcactcatggattctgtaattacaccgtccaccacaattagcggagaagaggaaccattaatggagcttgctcctctgacgagaatctgcatctcttcacccggaataccacttgatgtctgtgtctgtacacctgccaactggccggaaagtgcgtcacttaggctggtaatggggcgtccatcaatcgcatcggaggaaattttagcaactgaagtagtcagattcgactttttcactgaaccgtatcctaccacgatcacttcatccaacgttttagaatcttcttccagtttaatggtaagctgtgacctgccgttcacttttactcttttctctgtaaaacctacataagtaatgaccaacgttgcttctttacttacattcagggtaaacttaccatcgaggtcggtaattgtacctacagttttattcccactttccaccacattggcgccaataatgggttcccccatcatatcgaccactgttccggtgactttcatctgcgcccaagccatcgtgctcaagcataacacaaaaagagtcgccagaaaccttagtttttcataagaactcttttcttgattttctttgtcgttcataaactaaattttacaaggttaataaatcatttactattccttagcggtgcaaacatagagaatgttcacccgctcgacttggaaaatagtatcaaagacctgtaaaataagcccagaacacttcgtctgggacatttttaccagagaaacacgattttacatccgttgcttcaggtaattggcaggtgcgatgttatacgtagatttaaaaactttactaaaataagaagggtcagaatatccgacatcataagctacttcagaaacagtatatttacctgtggccaatttctcggcagccagcttcatgcggacattcaaaataagtttattaggtgatacatcggaaacagcctttattttccggaagaactgcgaacggctcatgcccaattcttcatgcagatcgttaacggacaagttaggatcatgtactctttcacggattagctccatcagttgttgcatgaaactatcctgagcactaagttcagctacgggaacttcaatagcatccagcttttcacagaaaatccggcgaagacgattccgatttttgatgagactatccagttttgccaataatactttcggagcaaatggctttaatacataatcatctgccatcacactatagccctcttcaatatgctcattcaaggcctttgctgtcaacaagacaacaggtatatgggccgtaatcatctcttctttaattgccttacataattcaagcccatccataaccggcatcatcacgtcactgactatcaaatcgggaatctgttcaaccgcttctttcaatccttcctttccattggaagcttcgtacacaatatactgttgggatagcaaagacacaatatactggcgcatatcgtcatcatcttctacaacaagtacacgataacggttgtcatcttctactgaagccggtttctcttcttcgataggagcaatacactccctccttactttttccagataggtatcttcacgattttcaacaaactctacattcgccccggcaaaacactcttttcccaagttcaattccaccaaaaactcggctccatgtccgggtgtgctttccactgatattttccctttatgcagtctcactacatattgcaccatattcaacccgatgccactaccaaacagatctgacttgctaccttgctctacctggaaaaacggatcgaatatcttcgacaaattctcctccgagattccttccccacaatctttcaccgaaatcacaacactgccagctttctccactgaacgaacttttatctgcgtgcctttgggagagtgtttcacagcattcgataacagattgaaaataactttttccatcaggtctgtatccatccaaagattatccccataataatcattgtcatatccgattgtcagctccttcttatgtaataaatccgagaaactatcaatctggctggtaaggaaagtccctatattgacacgactcaactttaatgtcatagctccatactctaactttcggaaatccattagttggttgacaagcaaaagcaggcgattcgaatttttataaatctgcttcatcgggaaaaggaatttatgaggcagcgtctcatcctgcaaaatatcttccgccgggccggtaatcaaagtcagcggagtacgtaattcatgtgagaagttggtgaaaagttctatcttcatccgataattacgttcaatattctctttttctatttcttctatcctccgctgatatttatccgatttccgcttgtagaaataatacagcacgcctcccaccagcatcagtgccagaagcacatagatcactttagcccatccggtgagccagacaggaggatgaaccacgacatcgatacctgtcgcatccccccaaatgccatcgctgttacatgcttttatataaaaggtatattccccggctggcaaatgcgaataaatgacttcattacgttcaatataattccaattctggtcaagtccctccatccggtaagcatatttatatcctttcggaaagatataatccaaaggggaatacttgatgagtacggcggcattcttataggataattccacatgttccagactgcgtgtattatcgtattgtacccggtcggctccttcgtcggagtcgagactatttacggaagatacatgtactacaggtaatagtctctcttgaccggcgataatttcctggggagcaaactctgctataccattgttgccacctacataaatcctcccatcctctacctgtaacagagtattccgggaaacctcattcaaagggaaccccgtatctttggtataattgacaattctggaatctttcattgacagtttggaaagtccgatcacagtagatatccaaaaatctccggtttctttatcttcgagtacaccgcagacagaattgtgtataagcccttgttctatgccgaaatggtcgatagttcctctctccaaatggcaacgatatacccccatattatatgttcccacccaaaggtagtgctggctatccaaataaagcagactcacatttttatttttcagttcatcaaaatcaagttggttgcctttaaagtaatgggctgcattattgggatgataaggaaaactccatactccactcgtacgcccgcctaccaacatactggagccatacgctaacaagtcctgtgtcagcataaaacgcgtgtttccatcttgatttgtcgaaaaagaacggctaagtttttttgtcttgggattgtagcaagacagttcatcctctgcaatccagatatttccctgtacatctttcgccatagcccgtatctgtgcatccggggggaacatatccatcatttccttactaatagaaagatctcgaagattcagcgagtatactcctttattgagtacatagaaaagtatctcattctcattattctgaaacatatagtatacttcatcttcactagctcctacttttcctattggtaaccggacttcctccactttaccgttagccaggtttaaagtacatatccctctattatgtccgatccataatttcccctgcgcctctatcagttttccggtcacccgtatcggctgatttatattcaaagtcagcggatgataacggaatagatattgtctggcattataaaacagagcaccttcattgaaggtccccaaccataacgatccctgtttgtctttgtaaagactcatcaaacgacggttagcaagcagtccggaaggaatacattcttcaaatgtccggctaataacatgtgtatgttcattcatcacagctaacccattatctgtagctaatagtaaaagagaatcgttatacacctttatatcatgcacctgtcctttccatacactcatatcagccgggaaattcacttcaatttttgttgctgtactggtaaccggattataaagttgtaaattatccagagaagaggccaaccaggtacgttctttttcgtcctgaaagattttcagaaatgccggataatccgggcctttcagaatatacgagaaacgggaagttcgtgtatccagtctaaggatacctttgtttgctacattcaagagaagagaattatctgcactgggtgccatactgtttatataaagtcctcttaacgcttccaaacaagtacattttccattccgaaggatatatacccccattttggtaaccacccatactgctccgtctgatgctatcgacagaccaaccaccaccccacgaggcaattcgcaacctttatataaagtggctaaatctatatatttctcctcaaagggatcgaaaagtgtaattccattaaaagttccaatccacattctgccttgcctgtctcctgtgatactgacaatatcattggattgtctgacggtctcatcggattcataaaagaaatttttaatttcataaccatccaaacgattcaacccgtcctttgtccctaaccatatatatcccatctcgtcctgatagatagcttttaccgtactgttggacagtccgtctgctacagtatacgaacggtaggggttatcggctaaaagaatcagggtactactgaacaatgtaatcaacaagaacgtaaactttttcatcaccatggtacagacatattcatatatgcaggcaaagataatatgtcttttcataaaataatagtccgcatgagggttttaactaaactgatatatggcattttcagctttaacccctgtaacccgaagaaaggatatagagaccaaaaaattcctctattgtctatgaaagacctcttcttatacactatgcccgcctattacttttacagcaatagacgggcacatagatgtattattctcctcaaaaaaataaagaaaataaagttgttttattagtaactctgaagcgttataatagaacgtgccggaatctgaatagtctttccacttttcactttttctaccggtagcaaattctccccttctttatccgaagtacgataaacctgccattgtgcattccctactttttctttatcaatagaaaactctttttcttcattagcatagttaatcactaccatcacatacgttccgtccacgtttttataagcagaacacatcaatccttgctgatcggtgtcgccatcaggaatcagagcgcctgtttgatcgaaagccgaaacggacaatcggactgctcccggacggataaaacgactataattacctaaagcccacatcagtttggagtcttctactctgccatctaagaaattattgtccgtagtatattcgcgaatcaatccatctttataatcgccgccaatagcacgccaccactgccagctttcagctctggcatacacaatatcgtgatgaatgatacgtgccacatagagcgctgtcttcatcgtatgatcgaaaccatttccaccaccgatttcttcatcattacccatgatgcaagtctccgtctgccagaaaccaacttgatgcttatctaatgtgtcccgcagttgacagcgaatattacgcaattcgcttaacggagttgttgtccaatagctatgaccgagcatcaaacggggaacattcggagtatctcccaaatatgtgtccacactatccggacagaagaaagcctgaatctgatacccccgttgccagtccgtttcgtgggtacggaacatacaacgataatcggaagactcattaaccaaaatctgtgtatccatgtcccggtctacaaactctttgcttaacagacgaaccgtgcgggccacttccctgtttgttgccggacagccttcctgcttcggaccgacccagttccagtgtccatccggttcattgaaaggacagatatagttgaacttgatgccatcatgttcttctacgccttgtactacatctgccagaaaacgagcgtacttttcataacaatccggtttcaggttcgctgtccctccacgtccggtgtttgttgccaatccgttctgcgtataatatacgggaggcgaattcagaaaagccagaaatttgttgactccccgttctttggccaatttcagaaagttgcgttgaccttgttgcttgttccagtcgtatgttccgtcgggattcaggaaacactcggcacgcatccagggggaagcaatctgactgttctctccttgttccgtactacctgctccaacgttaaaacgccaaagtgataagccgatacctttcggctgtccgttggcgttattctccgtgctgaacagccagtcggctatttggttttgtttctcctgcggccaaagcccgatgaattgcatactccaggcatcggaagcactgaagtatgccatcgtctgacaggggtggtctgtttctatctgataacgtatttcgggggcaggttgggaacatccacctgccacaccggctattgagaagaagcctaaagcggctaaaatctttttacctttcatactattcttctaaaatctttaattattcaaatcacacaatacaaccctaaaaacatccaaacaatccattgaaatccgaaaagatacaactaacgggtgggtattacttgtttaatgctcccatcttcattaaattccatacgatctatgcatacttcacgatgaacaccgggatcactcttcagataattcttattaatgcgatgataaacaatataccacttatcagtaccgggaacttgcaagatggaattatgagcagggccatatatttccttttccgggttttggatcaatacgacaggggtcttagctactttgatcggtcccaaaggtgatgtcgaagtgccataagctacatgataattaggagagccggtatcgtctaccgaccacatgaaatagtaaagcccgttacgataaaacacataagcagcctcacgatacgcataatcctgtagcgttcctccttcgggagtcatcaccgtgatagtctctttcttaattgaaatcatatcatcattgagctctgcacctgccatataaccgtttccccaatacaaatatgacttccccgaagccgaatcggtgaatacatccacatcaatctgttgcccgtgtcctgtaggtgaatctgttatgataggatgtcccaagtcgacaaacggtcctgcaggcgaatcacttgtagccactccgatctgttttcctcctcctgttttaggatttccactgtaataaaagaaatatttatgttgatctcctactaacttttcctctatacatggtgcccacgcattaccatccgcccaaggcacttggtctgattttacatccagcatgactccttcatccttccagttcttcaagtcgacggacgaaaaaacagtaaaataccagccgccccatccaggctgaccgtctgtggtagaataaatgtagtacttctttgtcttattagaatacaagatttcaggatcggcatgaaaacccggcaagacgggattgttcggcagttctccgagttcttccggcttgccccattcagctgtaaaatgcaacagttcatcacgggtaacagatttctcccgaacgatattttgtcgagagaaaatcggtaacaccgcgactatcatcactaagctaatcatcaatatggcttgtttcatgatttttctcattatcatatttttgtaattcgtaaacttcatcaggataaggatatctcccaatgagagatatagaaaacataagagaaagtatctacttttttcgagatgctttctcttatcatttatgcttctttatatgagttatctaatcatcactttcacgggaagtgaataaacgaactcactgttagaagactgtgcggcacgtacccctacccgagcgaatacatactcctcgcccgccaagcttccaagatccgcctccaaggtcatctcctccccaaaagatatcaccggattactaagagtcttgttagcttccttcttattgtaatctgtcagtattgatttaccaagacaaagagtaagcctactcacattggcagattccacgactttatcaactttaaatgtagctttcaccttaccgtcgtaatactgaaaggacgcatcccttatcgtaaaataaggagtgaccggtacatctaccaccgtatttcctctcactgtaatatacaccgtatccgcaggctggtctacccagggaccaccggcacgacgcgtcagcttatactccccgtcaaacaatgtggcagaaaaagttccatcgtatgcaatgttaagtgtaatacctgacttattcgcatacccatcctgccaaagaataaaacctgtaccatctgtttttacgggcaaagcctgtccattatacaccactctgcctgatagaacagaagtcggttcatcataattgtcgtacgagcatcctgaaagcatcaaaagacaacatactattattaaagataatctatttttcattgttctgatatttaattatggaacggattctttactattttaggattattatccaatacatcctgcgcgattgaagcataatagtttttcatttgaaaatacctggccttcttgaagcgggtaggattcattttctcaaagataaatttaccattatcctcatgtcccggtctgacaacccgataagggtaaagaccgcgaaccattgtgtcatcactttcaatcccattccatacttgatccgcaagtctccatcttttgagatcaaagtaacgatgatcctcgaaagccagctctaccctgcgttctttacgtagtatctccatagtcaatgtactaatgctattttccgggaaacctgcacgttcacgcaattcattaacatagaactccggatttgcttttttcaattctaaagccgcttccgccgcattcagataaatctcacccaggcggaaccacggccaccagttatccgcagacacaccacgcgcactggctcccgccccttcacttacgaacttacggatataaaagcctgtgttacttacgtcaggagtgttatctttcgggccatccaatcctgtccaaactcctccatcatcatagttgctccccaattgaggattcacacttaattcataatgaccgtctctccatatagcgactcctgcttgaatttccacaggagtccctctgaaagtagtacccggataaaccacagtaccatataaccgtgcatcttttcctttaaaaatatcagaagctttatcgtatacaatatagttgttgttttgatccttatactttaatgttccttttgaaccatccaaataatcgaaactttccaccaagcccaatgaaggggaaattgttgaagaactttcgttatcttccgtcaaatgccttacaatgttatcataagcaaaacgatggacttttaaagaagcgatatagtctttggcaaaaataatttccttattaccgtcttttaccatcaacatatcataaaagttctttcccttgtccgaatccttattatacagctcataaggaccatgcttgatgatttcttccgaagcatcaagagatttctggtaataggcatcggccatactagccggtatgccaacttctcccccttctgttgcaataggaacagacattaagttattatattttgcaatagatgccgcatataacatcgcgcgactctgcaaggcataagccgtatatgtattcgctcttgtctgactttcattattccccgcaagttgatccttaatctgctgtatctcattgtaaatgaaatcatatatctcatgctctttagcacgaggcgtttgcaaataggtcggatcaccactaaaatcatattccagaacattagtgattaaaggaacaccgcccatacgtttcaccatctcgaaataaacatacgctcttaaaaatctgaactctgcggtaaataaagtcttctgagattcctccagttccgtactgaatttagcaatcttctcaatagacatattgatatcacgaatcaaaccataatcccagtatctgccataatcacttccatattgaagctcatttctatagttctggtccattgtacccgtatacatagcatcgtcaatctccgtcataccacccgtattaaaatcgccatgcatttgcggtaacctgttataaatattagccaactgcgataatactaacttaggatcattccatacctgcccatcggtaagtatcgttttcggttctctttcaaaccaactgtcgccacagcttgtcaatgaggagccacaaatgactcctaataaaaataacttgatatatcttgctttcataattcgtatcaatttaatatgtaacattaaagcctataaggaaagttctctgctgtggataaacaacagcggcattcgccgaaatctccgggtcaattccaaattgatgcacattgtcgaatgaacataaattggagcagttggcataaatacgtattttctccgcttttatctttcctataatgctcttcggcaaactataccccaactccagattctttatgcgcaaataacgtacattatgaagccagaaatcactattcctattattagaagcagttgtccctttacggatagccggataatacccgggaatccactcactattcggatcatacggatctgccctatgccatctgtcttccaacagatattccggagaatttccgtttccatgatacggatttctcaattcataatcctgataccatccctgcatggcaccacccgcaaaatcgatgttcaaatcaatacccttccattcaagaccgattgtcccgccaaacgacaacattggagaccatccttgaggatatccgatcggacgctcgtccaaatccgttatccggccgtcaccattcacatctttataaatgaaatctccgggaagcaatgtacgattacggtctccgtctatatctaccggataatttttaatttcatcttcactctggaaacgcccaatcacttggtatccccaccaaactccaccccatcgatcttctgaggagttacgatattgatcccatgaatttccataacgtggtttataacgtgataccatcttatatcttgaataagtggcatttgcactaaccgtatagttcagttccccaattttatcactccaagtaacaataccttccgcaccgacataagcatctttatttagattctcgttcggtaacgaataacctacttcactgggaagttttacatcatagcgaccggcaggtataccactgatactcttcttgaaagcgtcgaatgtcgcagtcaatctattatcaaacaaagcaatatcaataccgatatttgcacttgtattcttcacccatgaaagattacgtataggcaatcctctttgattgagacctgttacaagctccccatccaacaccgcactcccttgattccaattgtatccgtccatataaccgaacatagatacaccggattcactaccggtttgaccaatagaagctctaatcttcaaatcattaaccacacccttcaaatttttgaagaatggttcttctgaaattcgccacccaattgaagcaccgggaaagaagccccatcttttacctgccgcataaagataagatccgtcataacgccccagcaactccaccaaatatttattctgataattgtaattaatacgaccaatccatccggccctagcctcgtatgaccaatcatcattaaaatcattcaacaaacttttctgtagtaacggcaagtaattgttagtcggactagttccctgcgactgatagtccttctcataatctgaagcttcataagcaacaacagccgaaatataatgttcacctaactgtttagcataatttagctgtaactgcatataccttgctgccacatctctttcggtctgatatctccaacgagaatctgtcccccccgttcttttatactcatctgtagtcttattataagtatatgcatcatacgaatactggaaaccatcaaatttactattcgtataattgtaagaaaatgttgctttcgccgttaatccaaagctaaaatcatactgggcatacgcattaatattagcattacgtgtcaggttatctttataaccagcaatatccctccggtaaagcgcaggattataagggatttcatgtgtatgattaatatatttaggattatcattggcataaggactctctgtaggccacattttaaacatccccagaatggcagagaaataaccgtcacctccgggaagtcctacatcttcacttttctcatatttgccgctaatctgtgtgcctatagtcagattctttaaaatcttggtctctacattggcttgaatattagttctcttgtaagagaagtctttcattaaagcatcctgacttgtctgggatacggaaatatagtgatttgttttatcagttcctcctgtaacattagcgttaatatgccattgaggtacattttttctcatgacaatatcataataatcataacttttatagcccggttccgttcctgccatccatttgtccagttcctcacgagtgtataaagcactcggatcacgtccattattctgttctgattctaccagacctctgacatactgcccggcattagccattttcgggaaacgggttaaattctgccatccataatatccattcacatttaccttattcttttctcccttatttccttttttagtagtgaccaagactacgccatttgacgcacggagaccataaatagaggcggaagcgtctttcaatattgaaatactctcaatatcttccagattcaaagaattaaaaacatcattaccggatacgttcgaactctgcacccaatccgaaccggtttgtccaccataaggaataccgtcaataacaaataaagggtttcccatattacgtacctctatgttgatacccttgcctggacgcgcgtccattgctctagtagacacaccttgtatctttccagataaagcaccggctgtggatgtcgaagcagaacgagatagcgattcagatttaacactactaattgctcccgtaacattacgcttagattgcgtaccatatccgacaacaattacttcctctaaagcttgagagtcttctattaaacgaatcttaagttccgattgtccattagccgctacctctttagttttatagcccaagaaagaaacctttaatatacaactcttattctcggttgagagtgagaatttaccatcaatgtctgtaatagtaccgatagtagtaccttttatcacaacatttgcccctataatgggctcaccttggggatccgtgacataccccgtgattcgactttgtgcaaatgccaccatagaaatgaatagcaaaacgctggttaacaaaaattttcgatacatcataatctcagattttaaagttttaactaatctcattttttcaaacgcatacaaatatatccaaacaataactaaaattagattaataatcattcatgcagcctacacaaatcgtgcaatgaatgatttatataccacaaatacaataattatttctatttttgagataaatataaaaacagcctttggtcatgaagcagaaaaaactcttcctactattcattatgctattgtcttgctctaaccggatgacagcgcaagtacctccttatatcgttcaagaaatcggaatcgaacaaggactgtccaataattatgtagtcaacattacacaagataaaaaggggtttctatggtttgccacggaagaaggattaaataagtttgatggaaccagatttaccacatactataaaaacaccccatcaaaaaactctcaaagcataaccggtaatgaattaaacatagtatgcgctgaccccagacgtccgattgtttggatagctactcaacgggaaggactgaacgcttataattatgaaacacagaactttaccatttatcagcataaggaagaagacagctctagcttgatcaccaatgacgtaacttacataactccatcaacacaatcagatgatggattatgggtctgtacttattatcgaggtattgactatttgaatataaccaccggagaattcacacattataataaacatacaatacccgctttaccttctgaacaaacatggactatcatggaagaaggaaataatacattatatattgggcatgttgacaacggcttgagcattctctccctgaaagataaatccgtcaaacactttatacacaacccgcaagacccacacagtttaccagggaacgatgtacgctgcatctataaagatacaaatgagaatatatggattggtacgaataaaggcttggctttgttcaatccaaacacaaactcatttacaaactttcacatgaatcccggcaattcccaaggggccttatccagttatattttctccattaaacaatttaaagataacaaactctggattgcgactgaattgaacggtattatgatcctggatttacggcaaaatcaattccttctgccggaacagatacattttgaatctatccgggaaggtgatgacaattacagtttatcaaacgccagcattcgatatgtctttcaagattcattcaataatatatggattggtacctggggaggaggaattaattttatcagcagccgtcccccttcattcaatacatggaactactcatccatccaaactaacgaaagagctttaaataacaaggtagtatgcagtatttgtagcgacatgcaaggaaaactgtggatagggactgacggaggaggaattaatgtttttgaaaatgggaaacgaacagccatttataataaggagaatggaaaactcatgtccaattcagtactatgctccttgaaagactctgagaacaatttatggttcggcacttatttagggaacataagtcattataataagcaatcaggagaattcaaaaccatcgaacttgaaaaaggtaaattattagatatcagaaccttttatgaagaccaggagaaaaatatttggataggtacacacaaaggaatttacgttttcagtctttccaagaagaaagttgtcaagcattacaatactctcaattgccaactacctgagaatttagtgcgtagcatcgcacaagatgacaaaggacgtttctggatagggacattcggaggaggaatcggcgtatatactcctcaaatgcaattaatcaagaagtttaatcagtacgagggtttctgctcaaataccatcaactcaatatatttaagtaaaagcaaacaggtttgggttgctacaggagaagggttagtctgttttcctacatccgactcttttgactaccaaatattccaaagagaagaaggtttgcctaacacacatataagagcaatcacagaagatgaaaacagcaatatatgggttagtacaaatacaggaattagctgctacattatagcacaaaagcgtttctacaattatgatcatttcaataacattccacaaggaaacttcatgagcggatgcgttactaaaaacaatgatggagttatttattttggttctatcaatggactatgtttctttactcccgatattgcaatgagtaaactcgaaactccaccggtagtcattaccgagatgaaaatattcgaacggttagagacaaccaagaataatgaaatatttattcccatattagaaaaaggggaggttgagcttacacatacccaaagcagctttagcttgacattcaatatacaagattactctctcgttaaccaagtggaatacacttatatgttgaagggactcgataaattatggtatgtcgttaacgaaaacaacagtgtcactttccgaaatatcccgccgggtaaatatgagttcctcatcaaagcacgggtacacaatcaggaatggccggaagaagcgacttcacttaccatccgtgtcaatccccctctttggctgacgtggtgggcaaagcttatctatattttagtatctatcagcatcatttatcttatcttgcatgcatataaaaagaagctggatttggaaagcctctacactttggaaaagaaaaaccatgagcaagaacaggaattgaaccaggaacgtctgcggttctacaccaatatcacccatgaactacgtacaccgttgaccttaatccttggtcccttggaagatatgcaaaaagaaacctcacttccggcaaaacaagcccagaagttatctgtcatccatcagagtgcactacggttgctcaacttgattaatcaaatactggaattccggaagacagagacacaaaacaagaaattgtgtgtcagcaaaggcaatatcgctcctctgatctatgagatagggcttaaatacaaagaactaaatcaaaagaccaagattgatttccagattcaaatagaaaaagaagaaatgtttcttttcttcgataaggaaatcattgccattgttttagataatcttatttccaacgcaatcaaatatacggaacagggacgcgtcactctaagtttgtatcaaacgatgcgcaatgaagttgcttatacggagataaaagtcagtgacacgggatatggaatttctgctgaagccctgccacatatttttgaccgttattatcaggaaagcggcaagcatcaggcatccggaacaggcattggcctggccctagtgaagaatctggtcaccctgcatgaaggagaaatccgggcagaaagtatgcaaaacgaaggaagtactttctatatcagcctattgacggataatatctatcccaatgccttacacgcagattctacagaaccgattcaagaagatacgaatcaggaagcaagccttgaatatccacaagaaaccacactggataccggtaaaccgatcctgttgattgtagaagacaatgaagagatacagaaatatatcgccgagtcctttgccgattcgttcgaagtactcaccgcctacaatggagaagaagggaagcaacaagctcttagccgcatcccggatattgtagtcagcgatattatgatgcctgtcatggacggtatcactctatgtcgccaattaaaagaggatgtacaaaccagtcatattcctgtcatcctattgacagccaaggattctctgcaagacaaagaagaaggatatgaggtaggagccgattcttatctgacaaagcctttcagtgcttctctactgcgcagccgtatcaacaatctgctggaatcaagaaagaaactgatagctcaattccagacacaatccgttccggacaatcaggcagatttaaaagaaaaacgtatcgtaatcgccgaagctctaagcaagctggataatgaatttattgaaaaaatcacccttttaatcgaagaaaacctctcttcggagaagattgatattacctatctttcagacaagatgtgtatgagcggttccaccctctaccggaaaatgaaagcactgacaggattatcgaccaacgaatatatccggaaagtgaaaatgcaaaatgcagaacgtttattgcttgaagggaagttcaacatctctgaaatcgcctataaagtaggaatgaacagtacggggtatttccgtcaatgctttaaagaggaatttggcgtctcgccttcggattacctgaagcagatcatacaatcataaaaagggagagagccatttacacttaatacgttttgagaaacaaattttgctcctgccgaaaaagaagagggtaaagtcataatgcctaaattaaaaggaaagagtccggtgctaacaccgaactctttatctatcttgctaatttataaaccgtccaacttttttggggccacttcaaacgatgcggcaggggtatttctctaaagaaaaacgttttaacacattctttataaatctgatttataataaaggaggggaggaacctattaaaacagagcctgttaaacagcatctacaaaaagaaaacattacaagcagtagtcgtgcgaactaagtcattccctcaattcttcagtcattgtctttagtaatgacctgctatcacttaacggcaaatccgtagctaaatcccaactcatcatacctttcagcttctgttcttttgcataacgggttttgatacgaatgttatcctgaccgtcaaacacataagtatctccctgatagatcacttcattctgtgcaggactcgtaaccaatccattctgtacaaaattgaaataagcctctgtcttctttgaattatctttggtcaccccataaaaaggaactcctgccaccagtttttccttcggaataccatactccaataccatctgtatatccgaacaatatttctctatcggaaaacgaaccggtgaaggaccatagcactgaagtgaaataaaatcaacagcttcaatagcttccttactaatcttataacaaacaggatgcagagatacactgaaaagatacttgtttcccaacacttcccgcatcttcaggatagccaaactataatctttatattctttctcattttctgcccactcaaaatcaagatcaatgccatccagtttattcttttccagtacagtctttatgttctttgcaaacgtcgtacgagcggcctcatcggccaccatcgctttccattcgccactggaagctcccaaacgtattttcacttttgtaccttttacttttgcacgaaccgatttaatcaaaccttcccaagtggtcaccccttttccctgaaatgcacgtggattctcaaatgacaatgatccgtctttattaggatgaacattcaagaaaataaggtcgtcacttgcccgcaagctttctgtagagatacgatcacgattgtaaaaattaccccgcacataagaactgaccatatagtcttgctgtgcaaacaatgataatccaacaaacaaaaaaaagaagaatacaatttttcttagcattagcataatgattgataattaaaacgtttagattgcaaaaatacgcatatcaaagggaaacagatgttcaaaaacaactataatacttccaaaaatcaacataaagttttctattcagaaatttacaacagataaatattgaattctctaacatcatccaaagggataagaataatatttgcaggtttctactaaaacataaataaaagaaagagttccattttccgcaaaaaaagcctatctttgttccgttaagataataaatcacgcataaaactcatgccaagagattcattttgcatacaatataccaactgtacgggatgtccaaaaaatgttgagaatatccttgtatatagaaacttacctaaaggagagcatatccccaaggataagtgtacgcagaattgtatgctttttatgataaagggcgaattacttatcaatagcgaagagcatcccggaataacgttacgcgagagacaaattgttttgcaagctattggctccaaggtcgaaatactggcactgacagatgttgaatacgttgtctactggttcaacgaactgcctttgctttgcgaagaccgatatagggaaatgatggaacaggcggaagctcctttgacctacactccactgattatgagcgaaaggctttaccaccttgtcaccagtatgcccgaattcctcgctgaggaaaacccttgcagcaagtatatcgacttaaaatgcaaagaactggttttcttgattaccaacttctatccgctgccccaactgagttcattcttctatccgatcagcacttatacggaaagtttccactatttcgtcatgcagaattacagcaacgtgaagaacgtggaagaatttgcgcatctgggaggatatacgaccactactttccgccgccttttcaaaaacctctatggtgtgcccgtatacgaatggatactggaaaagaaacgggaaggaatcctggaagacctgcagcacaccaaaatgcgaatcactgaaatctgtaacagatacggattcgactccctgtctcatttcgcccacttttgtaaagactctttcggagataccccacgcgctttacgcaagaaagcagccggcggtgagaaaatcggaaaagtacaataaacagcctcattctactaatgtgccaatcagttgcaccatgcgtacatactggctggcatattgacacattggcgcattgatccattattaaagaattatttctttaattccttgctcaatcaatctatttcccctatttttgcagtctgtaagaggtgtaaaacgtcgaaattttagttctaacaattaaataatttaaattcaatcatttatgtggttaagtaattcatctgtaggaaggaaagtggtgatgagcgttaccggtatcgcccttgtcctgtttctaacatttcacatggcgatgaacttggttgcaatcatctcggctgatggttacaacatgatttgtgagttcctgggagcaaactggtatgcgttagtggctaccgcaggactagccgctctttttgtgattcacatcatctacgcattctggctgacaatgcagaatcgcaaagcgcgtggtagcgaacgctatgcagtggttgacaaaccaaaaactgtagaatgggcatctcaaaacatgttggtgctgggtctgatcgttatcgtaggtcttggtttgcacctcttcaacttctgggcaaaaatgcagttgccggaactgatgcacaacatgggcatgcacgctgatacactgacgctggcttatgccgctaatggtgcttatcacatccagaagactttctctagcccggtttacgtagttctttacctcgtttggctgtttgctttgtggttccacctgactcacggtttctggagctctatgcaatcactgggatggaacaacaaagtatggatcaatcgttggaaatgcatttctaacatttattctacgattgttgtactcggtttcgcactggtagtagtggtattcttcgtgaaaacactgatttgtggcggtgcttgctaaatagtaaattgtaaatgattaaattgtaaataatattatgatcaagatagattcaaaaattccagaaggcccggtggctgagaaatggaccaactataaagctcaccagaaattggtgaaccccgctaataaacgtcgtttggacatcatcgttgtgggtacgggtctggcaggtgcttctgccgctgcttcacttggtgaaatgggtttcagagtattcaatttctgtattcaggattctccccgtcgtgcacactctatcgctgcacagggtggtatcaatgctgcaaagaattatcaaaatgacggtgactccgtttaccgtctgttctacgatactgtaaaaggtggtgactatcgtgcccgtgaagctaacgtatatcgtctagctgaagtgtctaacgctatcatcgaccaatgtgtagcacaaggtgttcctttcgctcgcgaatatggtggtacactagacaaccgttctttcggtggtgcacaggtatcccgtactttctacgctaaaggccagactggtcagcagttgttgctgggtgcttactctgcattgagccgtcaggtaaacgtaggtactgtaaaactgtacactcgttatgaaatgcaagatgtggtgatcgttgacggacgtgctcgcggtatcatcgctaaaaatcttgtaacaggtgaactggaacgcttcgccgctcacgcagtagttatcgctaccggtggttatggtaacgcttacttcttgtctaccaacgctatgggttgtaactgtacagctgctatctcttgctaccgcaagggtgctgtattcgctaaccctgcatacgttcagattcacccgacttgtatcccggtacacggtgacaagcagtctaaactgactttgatgtctgaatctctccgtaacgacggtcgtatctgggttccgaagaaaaaagaagatgctgtgaaacttcagaaaggcgaaatcaaaggaagtgatattcctgaagaagaccgcgactattacttggaacgccgctatccggcattcggtaacctggttccgcgtgacgttgccagccgtgccgctaaagaacgttgcgacgcaggtttcggtgtaaacaacacaggtttggccgtattcctcgacttctctgaagctatcaaccgtttgggtatcgacgttgttcttcaacgttatggtaacctcttcgatatgtacgaagaaatcactgacgttaatccgggcgaactggctaaagaaatcagtggtgtgaaatattataacccgatgatgatttatccggctatccactatacaatgggtggtatctgggtagactacgaactgcaaaccactatcaagggtctgttcgctatcggtgaatgtaacttctccgaccacggtgcaaaccgcctcggtgcttctgcattgatgcaaggtttggctgacggttacttcgtattgccttacactatccagaactatctggcagatcagatcactgttcctcgtttctctaccgatcttcctgaatttgctgaagctgaaaaagcagttcaagctaagatcgacaagttcatgagcatccagggtaaagaatctgttgattctatccacaagaaactgggtcatgtcatgtgggaatatgtaggtatgggacgtacggcagaaggcctgaagaaaggtatcgccgaactgaaagaaatccgcaaggaattcgaaacgaacttgtttatccccggttctaaggaaggtatgaacgtagagcttgacaaagcaatccgtctgtacgacttcatcactatgggtgagcttgttgcttacgacgcattgaaccgtaacgaaagttgtggtggtcacttccgtgaagaataccagactgaagaaggagaagcaaaacgtgatgacgaaaacttcttctatgtagcatgctgggaatatcaaggtgacgatgaaaaggctccggtattgcacaaagaaccgctggtatacgaagctatcaaggttcagactcgtaactacaagagctaatcggtgaagttaaacatttaaaagaattagaagaaaatggataaaaatatatcatttacactgaaggtatggcgccaagctggtccgaaagctaaaggtgcttttgaaacctaccaaatgaaagatatccccggtgatacttccttcctcgaaatgctggatattctgaacgaacagctcatcagcgaaagaaaagaaccggtagtattcgatcatgactgccgcgaaggtatctgcggtatgtgttctctttacatcaacggacacccgcacggtcctgcaacaggtgctactacttgccaaatctatatgcgtcgtttcaacgatggtgataccatcactgttgaaccttggcgttcggctggtttccctgtcatcaaagacttgatggtagaccgtactgcatacgacaagattatgcaagctggtggttatgtaagcgtacgcacaggtgctccgcaggatgctaacgctatcctgatcgcgaaacctatcgctgacgaagctatggatgctgcttcttgtatcggttgcggtgcttgtgtagctgcatgtaagaatggttctgctatgttgttcgtttctgcaaaagttagccagttgaacttgttgccgcaaggtaaaccggaagctttgcgccgtgcaaaagctatgttgtcaaagatggatgaactgggattcggtaactgtacaaacactcgtgcttgtgaagctgaatgtccgaaaaatatttctatcagcaacatcgctcgcttgaaccgcgacttcatcatcgcaaaattaaaagactagaaattgctagatttcaatagcgagagcttaatttgattaatgacagaatcccctgccggctagtccgacaggggatttctttatgtatgagtagatcacaattattattaatacggatcagtaacatgaacttttaattcataagtttcaccgatttcaccttatagccagaactgttatgaatgagagaattacgggtgaaagcgaggattgaaataaggtaaaatcattcgttaccgcgtaagcgtctccgcgattctatatagtgtattaaaataaaaaggctaatgatccctttttagtcattagccttttcccatctgtcaggaagcagttccctgtatttctcaattggtgtgttcggttgccattcggctgttctgtttatcacatccgtgagatactcaaatagattcactttatgcatcctacaagtgagtgctatcgtgtagagtatggcgcctcgttcggcccccttatggctgccgaagaacaatgagttttttcttgataaggatatgtaccggttcatccgttcaaccatattgttgtccagataagtgtcaccataattaaagatgtccaccactgcattccactcattgcgaagataggtaatggcttcctgcagttcgctcttaggtaataaatccccccgttcttctatttcatcaagcacatcttttatttctccgagtatgtccggcgcatacttttttcgatgcataagattctgttctaccgtccatccctcagccccaactttatgcttatgctcgttttgataaagtgcgtttatcagctccacgatcctttttgcatccgggtccttctcaccgcaatctataaatttccgttttatatgttgcaagcacgggatgcgtgtgatattgggataagcatcgctttcgagcttccggtaaggtgagtaaccatcgctttgtatgatacctttgcaactgcctaattcgttaagaataactctttcagaccgggagccgtcatcatagagcaagtatatcatcctggtgtttatgccgacaaccacccaaaggtatcccttcctgactccttttcccttgctgttcttttccgggacgagtattttgtaataggtttcatcggctgccttataaggatcactcaaagctgtctgccggatgcacttataaagattttcgaagaggtttgaggctttctctatcaacttatgagccgtaggtttcttcagcgtaaagccatgactctcgaagtagttgatgattctttcaacaggtagcgattgtatataacgtaattccatcaatccggcaataaatgaaccgtcatagctggaattcaagaaggccgaagccggtgtttttccctcaaacaggcgaccttcttgcgtataggtgtgtatcttgtagacatgcttgatgaagcgcatgggtacacattcatagcggacgcatattctgggaacagtggtaaacaaccgggccttattgatgtcaaaatcgggatcatcgggataaacgacatgttcttcttcctccatctcataatgcatgtcacgtttggccccattattctttcttgctttacgcttatctgctttttccgcttctatcttctgccgctcttcttcggatatggcagattggggagcctgttgctgttcggatgtgttggatacaagtttggcgagtcccttagtaaggcgctgttgcttgctaagagattcgcctttttgaaggagtgcctctttaagggaagaaacctcctttatcaaagcatctatttggtccaagagtctgttgttgtcatctcgtaatcccttgatttgttccttcaataactctatgatctcatcctttttcatggcataaagatataaaaaatcaacgaattggccaaataaaccggatgatatctttagcacaaataactaataatcagaatgttgaattagatcctgaaacgctttctcaaccgtacagactttaatgacactccatttaagataaaagacaaaacctgataagaaatctcgtaattgcctgtattggggttaaatgtcggtaactcaaaacttccaccttcgaggcgcttgtagtacagaagaaagccatcgccatcccaacgcagtatttttacactttgtcggtttttaccaaagaataaaaagatatctccggaaacgggagacaagtccttcatttccgatcgtataattttgaataaaccgtcaatgccaaggttcatacgaacaaagccctggtacagatagtagcgattggctgatgttagagaatacatggatctccctcctttctttcgtaatcgcgcaacattttaataacaccaccgggtgtggcccgtttgaccgaaatggtggttccactgttaaaggtgattgtgatcccggcaagactaaactcttcttccgacaacatggcgggtgctatttgagtgaatgaaggagaggaagttgtcggttgggagggttcaacgccgccataataatcacggaccacatctgccttggcttgtttaacgctatagccccgtctggacatccaggaactcataccaccaaaagtggtatgctgatcgcggcaaacatcggctaaagaacaattgtagtctactttcaatacttcaaggaaatgtttccaagtttttccaaatcgattttctgctaaatccataatgcttcatttttatacatcgcaaaaatataagaatgaaaaaagggcgacaagatagaatcgcggagacgcttacgttaccgctttcacctgtcttattaaaatatcccttgagctaaaacaattatcattatagctaatccggatatgcttatagcaaatccgctttcaggtgttaatgagtgaactgtgcggatgtaatactttggccgccaggtcttaacaccttagttctcatgtgttaatacttgagttgttgcatctatatatctagcatcttggagctatatatccaacatcttggagctatatatccaacaccttggatctatatgtccaacagtcggtatgaataaactcaataggtgaaaccgggaaggttcagtttcgcctgaatttctcccttgctttcacccgctgttaccttattcatcggcatttagagaattgggtgaaaccggtgaaccgcagttattttacatagttgcatttatgaaatgtcttgcctacgtaaattacgtggagaggcaccaaaagatttcttgcagaaattagaaaaatggggtaaagattcaaaaccatatttatagcatatctccgagatgctacatttagagttgttcaagtcgtccagaatgccctctttacgtctcgccagcatccattcataaacaggttcatgaaagacgttattgaagatacgacggaatgtactaagggtatatccacccaattgtgccagttcttccactgtctttactttcttatagttttgaataacgaagtattggaaactgtttacatatttagagagtggatgcaccaaactcgaaagatcataatcggaataatagtatcccaatacaaacgccaattcttttcgtttcagagatagcaaatcccgacagactttatcccctttcagataagtgatagacccattgaggaaatattgcagttctggaattatttttaatggagtataaataagtggaggagatacttccttcatgatatgattgaaacggaaatcacaaaacagttcgggctggataaaacgataataaatacactcacattcagtcatagcaagcatctcaaacatagaaccaatagcctgaaggataaattcaccttccttaagcattgtccccgcatattccttactattgaccagtatttctcccttcatcaaaaaaaggataagattttcttcacacttttgagccggtttatgaaaaccacgctgataaatcacatgagtaatggcattactcaccgcttttggacatatttgacaatcccaggttccttgacaaatagatggcatacgctgactgtgtttgtttttgtttatgctgccagcaaaaatatatgaaatctttcatattgccataaaaaaagagagaaaagtgaaaaagaggttgaagagaaatatataaaacttcgtgaactggctttatcttttaagattcaagatcaataaactaacagccataggtctaatttagtaaaacctacggctgttatcctttcgtccttaccggactctatatatttctaaatatatattaatttgcatcaggtgtcacaggcttatcattatcatcttcccaattctttacatctgttgcaatatctatcttatctgctccagctggcaaagtcaacttatagcgtatactattacctataccccattttgaatctttagaaagagtaactgttttagaaccatcaaagaaagtttcgttagcactatttaccatcttcgttgttttatattttataacaatctgagcaccttcaacatcttgcggtaataacattaatgaaccatcgggcgaatctaaaccaaaatagccactggcatctgcagtgcttgcaacagttatcggataggtatatccagcagctactgtttcaccagtgctccatgtcccaacagcaacatcagcagcataagtatatgtagcatttcctccttttacacccgtaatctttatttcagtaatagtataggtgaaacttgtatcttccggtttataagagaaattaatcttagcaagaatatgtttaaaatccaaagtgactgtgttactatcagctggtttagctgtatttttagccgcaacaactaaatctgtttgttctgcagaagttgctccaatagcaaacgcaagagtaggatatccttttgcggcatcagtaggatttaccaatgttaaagcgctcggataaccaaagaactgtacatttttgcctacaggccaataatatttattatcacctgaagttatccaactaccctgttttcctgtatattcaactccatccatatacggagagccaagaagcgttgttgaaaaatcaaaatcatttgccacaataaatgaacttactttaaaggaaccaaaattcacattagtcatttctgctgctcttgatgttcctttaacaatcgtaccaatattaatctccgctttctgtgcagcattctcaaattcttcattctgtgagcaacccgtaattgccaaagcagctgtaactgccaataaaatcttcttcataactgtattttttaaagtttataatattgttatattttgtttatagcatctatttcaattcacgggtaactcaacattatcttcgggtccccagtcatcaacattgccgcccattcctccacctccatcaggattcggtggcgtttccggcttatcaacctcaatcttatcatcaggcggtaactcaatctccggtggtgggattggttttccatcttcccctgttccagcattttcaagtgtacctattatttcagtaacatcaattgttgcttcctgaactgtattatctgttttgataaatttcaatattaatattatagcatctttctcactagaagtttctctctctgatgttgacattcgcgtcggcattgtcatttcctttacttgtttgaaagcggtgaaagatgccgttactttattgtctcccttccttacctcaaagtagataggttgtgagctacatactccacgacctttgcctatacagtaacaatcggataatccatcaatgcttcctaccactgttgcaacatactccaaacctttagcctctactgcaaaagaatattttttcaccacagattccaacttccagtctaagcgaagcacttcttcactcttctctattttcagctcatctatattcaacacatacaatgaatccggtgaccaaaccatcttttccgttccttcaatccctaaaccattgcagtttcccgtgtaggcttctatcgtttcataggactcttcacccctgattcgtatagattccgtgttatagttgtagactactaccgaataccgtcccggaggaactttcatttctccgcctcgtaccgaaaggtatttatctactttcctgccatctccgttcttcggataaaaaatcacccgaactccctccggcagttgatctgtcactccatcccaatccagctttatatctaccccacttacgggataatcatccaatatatcgcgacggctacatccagttagcatcagcagcgaggacaaaagcacaagaaacccgtatcttgtatttcgcattacgccctcctatctctttgttgtcatcaaccataccaaagaaactttcgccttggtagggccaataaagttataacgtccactatttgtccatataatatctccctcataaggagtatattttttatattctgttgtcaaataccctatgccaagactgaattcaagggaaaaatgccgtgccaactgccgtgcatatccataaatcactcccgcagctccgtaatacttaccttgataaccgtcttcacgtaactggaaatcatatatcccgccttcagcataaagtccgataaaatgtccgatcaatcggtcacgtttctgacggtttcccagccaacaacgtccttccatccctcccgaaaggagctgatagcagaaatcatgtttgctattcagccaccacggacatttaaataggagtatttacaaccgattattactcaatattttatagataataagtcagaaatatggttgttatttttaattgcacattctaaaaggtgaagatttaacgcttttattgattattaactcaaaaaggacatcaacttgggtcgtttcttctcttttccttgctattcgtttccgatattccacttttgttttggtctatctcatatgtactgcaaaggtattgatttttgtttgatattgctccttgcttgctccttgtcgtagattaattttcacacaggaatttttgttctctttctataggggcttgaaacaatccatttattggaaacaattaaagacggagctggtttgccccagtgctttttaagaaacagggcaattattttatctccacaaaggctcttgttcccaattatgaggaaagcctaataaacgagttcttactgatgggtatttcgataaaagctgcttgaaatctgcaacaaaagtgttgcccatagaaatggagttaagccaatacaccacatagcagagttgcggataaagtgtttgttcacggaacgagaaatccgtaatccatgtgtttggcatacgcataggcatcattggcttgacaggaaagacccgatttgacagtcttgaatgatgggcgcagcaattacgaagtacgggtctgggtacggattaaaaggctaagtgattatttccagtcatttagcctttttaattatctaatttttccccacattttccccacagctgtctatttatatatttttatatattttagaaacatatttttccgtaaagttatgtacctttgtcggcaaataaagatattctcgtcaaacaaatataaataatataaacatggaaaaaaacagaaaaaaacaaatcgtagttttgagtatagctttagtttgcattttcatcttggtattttcattgttccataaatcagcgacaaaagatagcgcaaatcctcctttaacaaatgttttgactgatagcatttctcaaattgtctcagcttgtcctggcgaaattggtgtggcggttattgttaataacagagatacggttaaggtcaataataagagtgtttatcctatgatgagtgtgtttaaggttcatcaggcattagctctttgtaatgactttgacaataaaggaatttcacttgataccttagtaaatataaatagggataaacttgacccaaagacttggagtcctatgctgaaagattattcagggccagtcatatcattgacagtgagagatttgctgcgttatactcttactcagagtgacaacaatgcaagcaaccttatgtttaaggatatggttaatgtcgctcaaacagatagttttatagccacactcattcctcgttcaagttttcagatagcttatacggaagaggaaatgtcggctgaccataacaaggcttactctaactatacatctcctcttggtgctgcaatgttgatgaatcgtttgtttactgaaggtcttatcgatgatgagaaacaaagtttcattaagaatacgttaaaagaatgcaaaacaggtgtagataggatagcagctccacttcttgataaagaaggggttgttatagcgcataagacaggttcaggtaatgttaatgaaaatggtgttcttgcagctcacaatgatgttgcctatatatgtctgcctaataatatcagttataccttagcggtatttgttaaggatttcaagggaaatgaatcacaagcgtcacaatatgttgcgcatatatcagctgtagtatattctttattaatgcaaacttcagtaaaatcttaaactgcacttgctttgataattaatgataaacaatctaaaagcactctaatcgttatcggagtgcttttagattactaatcaaattgcttctattataatttgaatcctctactttttctttcttcctgttgcggcactcttgctccatatctaagcctgtgccattgctccctgaaccagtcggcaatcggcttcctgtttattgtcaggttcagcctgctttcatcgtcagggtcattttccacccttaaaatatcatcctttatatcaaagttccgcctgtgttgctcggaatagattttaccgctacatttcagggcttcttttttgactataagactttcagtcatttctttagagaatcccagcatggcacaaaacttttccatgcgcagcatttccctgaacatcggaaaccacctgaaagccttgtctatgattctggcgagccgtgacagttctttttctttcatgtcaagttcctgcctgtgcatttctctgagattgtggatttgcgtatcatgctgtttctgcatctgctgtacttggctctgcaatttttcaatattggtgttccgttttgaaacctcgtcttgcagtttttcgttggcacgttccagttctttcagttttccactcccgaaaagagaagcaactccactagttatggctgtcgctgccgtggtggctgtcttctttaacttgtcagtgcgtatttctgatttcacctgtttcagttcctgctcggcaagatttatctgttcttctttgtgccgtttggctgcatccatgcgttgcagttcagctttctgcttctcaatgataaagtcgttccgttccagatgctccttaccagtgacagcctttgactgcccgcgttccatcagcaggatgtcggatgcaagggtctgcatctgcatcatgtcatcgtcattgagctttcggctctttcctgtttcgtggttcatccagtcgaaaacgatatgggcatgatagttcggcttgaaccatctgtccccgactttgaagctttccctgtcttccgcttccggctgaccgttcagccaatgcccttcatccttgtgcaggaagatttgcagcggtgtgattccccagcgtctttgacactcctcaccgaatttacgcacgtctgccagtgtggtgtccgacctgacaagcagcactccttcacgtatgggggagcatcccgcaatcttgactattttaccgttcttgcctttgcgttcacgctccttttcctgcatggcacgtccggtcttttcctttaccatctgtctgatattgtcataatgcatccgcaaatccggactgccgaagtcgggatttatccactgttcgttatcggtggatagttcaggaacgacatagattctggactctccgatgtggcgcatgtattcggcagtcctcctgttgtgagcctcgctcgatgcgatgttgcagggcttgatatgtatgcttgattttgttgccatagatacttgttttttggtttgtactttattgtttgcttttccgctgtccgtaaacgcatggggttcttaggggtgcaacccataagcggagattgcaaagagagggtcactctttgctctgggttctcaggggagaaacgccctgagtgggtcattagggtaaaaccctaatcccctcgggagagcccacaactacgtaagcggagcgtgtagttatagtgggctatatcaatggcaagccattgtctgcaaactccagcctacggcttccgctctcctccgtcagggaggtttttcatcatcgttgccgattggagatgcaccgaccagcacaaggtctaaatcgtctatcagtttttgcaggacgggattcttctctatcatccgctggaggattctctcagcctcgaccaagtggttggctgtactcatcaccttgccctcccgtatctgaaagataatccaatcggctatgtcgatatgggcttctttttgtttcggggtggcattcctttcgatgatgtccgaaaccaccaccttacaaaagtacatgctctcggctcgctgtttccactcggcataagcatcggcatcgggaaagagaagcacggttcgccctgacagtacacggagtttctcttctctcatctgactcttaccacccgtagccagccatacataatcggggaagatagcagaaccgataacggcactcttctcggattccaccaagaccaccaccttgtcgggatgcgttttcaacaagtgttccccgaaaaggcattgggatagttgccaatcctctgccaacacacgctgctttttcaatatgctgtgtatccagttcactgccgatgtctgtcctcccttgatacggtgtccgtcttcgggattgtactgcatcacctttcccgtgcgtaccttgcccgtcctgtctatctgccaaaagataacagagccgtcacgggtagcccccaaacggtattcctccaacaaccgcttcaacacctctttcgccttgtcgccatagtaggaagtaaggagtgtgaagaggaaacggaagaaattgctacgctcgctttgcgacttctccacatagtgagggggaatatagccgatggctgtcggcttactttgctgcttcactttcttctgctctgctctttgcctgtcaaaagagaaatcattggtagttctgtgttcaggatgctcttgaaaatactctttcggagtgtagtgatacccacaaccgctttcgtggttacatctgccgaccgatggatgcaacggcacattattttcgtccacgtaatagacgaaagaatgcctgtctccgcatttggggcaggtatgccgtgttgccgttcctttatacttctgtaatgaataattgcccatagcttagtccgtttttgatggttgattgtcggctgtcccatcctgtcccattgtcccacactctaagggttgggacagtgggacacttgggacacctgcgtttttactctctttgctgcgctggatgatacggtttacggtggacttgccacaattcacctgtgaggctatctccctgacggacttgcccgattgggagagttgcagaatttggcaatccctttggcttgattcattgtcgcccaattttttcaagtgttccttttccgtggaatagcccctgaacacgaactgcaagaaagcatccaccttgtcaatctcgtaaacgattacattatccgcatcatgagagaacgtgccatagcgcactttaagctgcttcacatagcgaagccctccgtcttgggcactttttccaatggtgaacacgctgtcaaagaaattgtagagccgtttgcttccggcaaggtcgttggatgtgatgggacaatccaaagagcgtttgggcgtatgtgctaggacaaggatagagagcgcatatctctttttgagattgttcagctgaatcatcagccgtcctgcggcatcgcctttctccatggcgcaacacaggtaggtaagattgtcaatgatgaaaatcttgcagtcggtctgcacagccatctgttcaatgccgcctatgatagcttcctcaaagttggcatccaaaagctggttgcagtcaatagacacccgatagagtttgtcgggaaaggtgtagagctctccatgctcgttggtatagcggagctggaactgcttttcggacagttcaaagtccagatacagcacattgtcggttcgggcgatgcggtcggctatctgcacggcaaggatggacttgcccacgttggaatcggcaaacaagcaggagagttccccctcgtaccaaaagctgtcccacagcgcacggggcgtaggcaataacgatgcttcaagaatggtttggtttgccgtcttgatattcatcatgcctacactgtcgggcataccgttatgcgcttgggatgcttttgtgaggtcgccacgtatcaggttgatatagttcttatcctcttccatatcattcaccagttacgtgggttgggcttgcgacggtgggaagaggataaggacttgttcagttcctcgtctgacaacggtatgggattctttcgggcggtttccagccacttgtccagttcgtcacggtaaaggcaatagcgtttgccgggcttggtggcagggattgtcccttctgacagtttcatgtagagcgtacccttagggatacctaaatactctgctgcctcgtccacagacatgggcacgtgggtgtccaccgttttggcattgttcacactgcgctgctcggcgagcaggcttttcaggctcatcacttcgtctcgaagctgagcgacaacctcggggaggtcgttgaaggtaagaattgatttttccattcgcgtactcgtctcttttgtaagacttggcgcaaaggactgaaatgatatatccgtgaatatctccacgacacgtcattgcaaaataattcccgaataattaagcccagccataaatgacgggtaaaattactcgggaaacgatgtaaaacaggcggttatgagttaccggatggttgtcgttggtgtcgtgattatcctaattccgcacataatcctcgggatagtggaaatcaagtttgccgttttcgggttcatcaatgggaatttccgtctttaacggctctaccttgaaattcttgatggttgataagtctgtatcagcaaacgatttcgggaaaagggctttgatgaacttggcacggttatccccattgtagtatctcttgtacaggaaacgctcagagatattccatacgaagtgacggagtggaatgttgttgatgtctttggtaaacggtctttgtatgggcttcggggtataagtgttaagattcatccatttgtccacctcagtacagatgtggttcacggtttcttggtcggcaatgcgaggcaggtaataatggcaatactccatgaccatgcggatgcgctcttccttttcccgttgctctctgcttgcgtaattggcacggttcttttcgtgaagatccggggcgatagtaagctctatcggttgtgtttggataagtgtctcttcttttgtcggggatgattcgggtacaggctcagggactgatgtaggtccaggcacagatgtggcttcttcaagtgtattttgtgacagttcttcctgcacctctatggcttcggcaatcgtttctttcttgccgaacttgattttgtagatttcgtatgtatcaaagataagtgtctgaaaggagagatagagcaaccatcccaacaggttacagcatacgaatactatccacctgacaaagttgtcttggttgaagctgtccgctattaccagcgtggcaatggaagatattaggacgatggcgaagccgacaaagcccaagatgatgtatttgtccttgattgatgattccatatttcgttgagagattgaatgttcctgtattattttgtgcaaagttaatgctatttttcccaattactgcccgttatttgcggttagaacggtctttttcaatgtatttcacgaaatgtcatcatatcatactctgtttcatactctgaggggcttataaatggtggcatcaagccaaaaacatagaggggcgattatagccttgtagccataaccgcccctctgaatacctgtcaatgtgagacatttatgcctccttgcgtttcaaggttatcttgtccaccacctgacacatctgctgcgctgctatcttggaatagatttgtgtggtggtaatgttcttatgtccgagataggcttggatgacagccatgtccgttcccatttccacgtgcaggcttccgaagctgtggcgggtacagtgaaaggtgattttcttggttatccctgctgccgtgagccaccgttggagtggtccttgcagcatcttgtccttgaaatcctcaaagataagtccctcgccccgttctcccagcagtccataggcttcatcactgatggggttatgcactatttctttggttttctgcatacgggtggtaacgaacatcctgccgttggtgtatggttgtatctgctgccacgtgagctgtctgatgtcgctctttctcagtcccgtaagacaggcgaaaagaaaagcttttttcaagacctcctcctcacagggtgtttcggcaagccgtatcagttcctcttggctcaaatgctccctgatggtgggaatgcactcgatgcggtctaagaagccgtttgggttctcctttatcttcctgtcacggtaagcggtgtgcagcacggcacggaaagttgaccaatagcctgctgcggagttgatgtgcagcttttggttggtgtggatggattggggtgcatcaagcaggtattccatgaacttgcggcacaaatccacatccacctcctcaaaggtgcatttgccgttcacgaaccgctggaaatgcttgtatacgtgctgccacttgatattcttgcggtcagccagtcctttgaaataggcaaggaaatcgcccttcatcttggtcttgtcaaaaaagccgttgttttcattgaaaatggcttcgtagcgctggttgcgcaggatgaccgctttcttcatcatgcgtgcgttgaagtcccgttcctgctggtttgcaggtttggcgaagatgtaaattcctaaggcttcacgtgtaatcactctcatggtgacattgtcacggtagccgggatagtagtcaaggcatagtgaatactgtgtcccgttcttaatcttgcgcttacgcaaggtaactgttttgcatttactcataataattatgttttaattggttgtatacattttggagttgtatccatgtttccgatggcaaaggaacaacgtgaaatatccgtgaatacctccacgatacatcattttgaaataattttcgataatcccgatttttcacggttatttgttcctttcagccatgacacgctccacatctgagcgcaaaagcaggtttttcacacccacctttatcttttcgatgtgcttcaccttgacgatatggcagatgttggctgacgaaagaccatagatttgctgcacctgctcaacggtatagtagcgttcatcgttcacaaggtcagttctgcggagttcgttcaaatgtgatttggagtaataggtacgcccgtactctcttttagtgggtatcttatggcgataggtgtaggcacggagtgcggtcggcttcatgccgaacagttcctccacctcctcggtcagtagccagtcggtaatttcgctaatatcaactgccacaccgaaaaactcgtcaatatgcttcttgctgtaatagttctttcctgcgatacggcagatggggatatggttacgcttggcggaagtgtaaagccatgactgctttaccttaaaaagggacatcacctcctcgcccgaatagaagtccaacacttcttcgctttccttttcccttttttctcttttggcaggtaaggaagatgaagatgatttccttggtgtggaggtgttgccgggcaggatgcggtgatagggattgccctccaacatctgctcgatgtcggctctgcggatgaatgccatgcggttgctgatgcgtgaggctttcagcttgccgatggctacaagtttgtaaatgtactgtcgggaacagcccatgaggatggctgctttggaaaaggtgagatactcctgatgctgtatctccatcaagggttgggcgactttgaagaggttgttcttctgcatcactctggctcgtttggcttctgcctgacaagcctcactgcaatatctttgcataccgcttcgggttacaaaggacttgccgcaaaaactgcattttctggttgctttcataccgttttatcgtttaatggttcatttcttcaatcctatatctctgaaatggtaaacggatgtgaacggaagtcaaccattgtcgcttttctacacagtgtgactgtttccgcatatcggggcggttattgtcgcttgtcgtaaacggttgtaaacccttgtcaactgtctgcacggtgtgacaaaaaacaagccccgcaaattctccacgtcagaaatacgtctcaaaaatatgtggaaatttgggaagcgacaaatggcaaccgaaaagtgttaaattttagaatatgctggtaattaaagatttacactcggatatttctgattagttttggttgttctatggttataaatacatattcagtattcaaagaccacctcttgcctatcggaatttccacttctatatttggcgccaatgccaaatcatataacagattattcttcacagcaagtacagtttggcttttcaccggcccttctgcctccgatatatcgacctcacaggcctgttttttttcactttctcccacaggcttatcaggttgatctttcggaagcgcctcttcctgctttgaaacaaacaacccggagacagaagataccggttcaaaagcctctttacctaatttcgaagtttctccgacaatcgtaataaccgatctccgcagttctggaaagatattgtgaacaatgtatcggtaagcaattccccgattcaattttcgcaacagttgcttccgtttattgacatcattcttatgataatcaatcaatatcagcacttcttcccgatctggtaagttggagtcggatgccaccaacttacgaaactccgaccaatcctctccctctgaaaaaaaatgaatcttatcaacaccaacatccgaattataccgttgtaagaattcctttatcgaatcatttctccgagcagccaaacttctattataagattcatcaccatcaggagaaacaaaagtttccacattcagcgctgttatatatttcgtattcaaatttccgagaagcaaagaatctaaaaatgtaattacctgattattatctttataactaagattcactttcgcttcattcgcatcaaaatatatcaccacccgccggattgtatcattcgcaacagcgaaaaatggaatcgaagcatacccactttctggaaggcttaataaagccataagaatagtcaatatatagataccatgtttcattgtcgttcgtttctgatgacaaatatagaagttagaaaacaaaccgaatcatacttttagaacaaaaatcaagacatgaaagattctgtgaaacgattgaaacgattttgcaagttttgagagtttaaggtcaataataaacagaaaaaatgtccttggtaactcatctgcgtgataacaccgtacttctgttccgcctgcaaacagttcacattcataggaagttctgacaagcggcttttccacatacacatggataccaagcttcatcgcctctatacaaatcggaaaataactatgatcgggagtcgccaggaattttctacgagatattttatccccacccaaaaatttcattaaagaaatcatgtatcaaagtgggtttatgaatagatcacatttctataaggagtttacaaagcggatgggagtggtacctaaagactaccgttttgcataataaaaattagatatagattgcatctttctctatatgattgcgaaataaactacgcataattgcggttaaagacacgacatccacttttgcattaaaacgctcttctaatgactcttttatttccattcgagtaaaataatccggatcttgaagctttacacaaatatcaatatcactatcctctttctgctcaccacgagccacagaaccaaaaagtcccaacttttcaattccatatctctccccaaattcttccttaaaattccggagaatagcgattatttcatcttttgttttcaattgacactattgttataatgcaaatgttaaaatttatattggaattagcaagttcttaatcatattttatagtatcactaattaaaaaaagatgcacaggtcatcgaattttcatcgatcccctgtacacctactactctaaattctacttcaaaacataaatagcctaattatgctgccgaatccattattaacaaccatgttagttttatccatcaaaagtacagaacataattacgtaaatagttcagaagtgcccagaatgccatcatcattgccaatacaaacaaaacgacaagaccgatcgccaaagcaatccaatgttgtgaatgatcatcagaatattctttgtgaccatcattaaacttgtatattgtccgcactgtctgcgctcctgccaataacccgaacactccggcaaaaataccattatgaatgtttccaccgccacgaagtgtccgcttatcaattaagaattgaggcgtcctgctcgctaccacatacaaaccggtagctattaaagtagaaaacatcataccgactcccatcatccaatacatcaagatacccacaatgacacctaaccagattaatttcctggaaccatcaaaatgacgttcttcaccactattaatcacatcagtcaatgagtttaagcgttctatgacatcagcatcagtaggacacataccgataacctgatcaatcaaaagaacagatttcttaatttgcttcatctttgtcggctttctgaattcatcatcatctgttttttcaatcaccgtccaagtagcaaatgcctcatccatcagcttccacgcctccgttatctcttcatccgtcattttctccggcattccggctgcaaggcgtttattcaacattccttctaccgtaaaaacctctttataacgtgcgcccttataccatacaaaaaacatatgccccacaataaataaaacaacggcaatagacaaaaccagttggacaacagccaatatctttactcccaaaggaactccgtcatccgccgcagcatcagctattgcatcagctccactaccgctttttacaagtgtcaatccattaaaggcagcatcttttccgcctttatcaagtccggtaaacgacaacttatcatccttataaacgactttgcattgaccggaaatcccggcatcaacctccggacgtccgcctacaaaagaaagagtcagttcattcccgttcatactctcgacgtaaaactcataagttgccatcaaagattcccttccaccgggttccagcatattcacttccataaatccattgcatctggcattctcattataaggattcaattgccaattaccatcacaattcaatgtgaacgcaacctttaaatcgccttctttatttgctcctagccagtcaccgctaaaaacatcttcctgcgcaaatgcagtcatcgaaataaccatcattacaatggcacacaaatactttttaatattcttcataatataataaaattaatatttcaacaccttggctgccacgttcttaaattgcgacatggcaagcccgatagaagctccgatataagtaggatcacaaataatgtacttctttccgcttacagttatataatctccgtcaatgttttcatcaaaacagaccgctgttgccatgtgattgggatattccaacaatacaacatcaagccccataagagtacgtaccaaataagagtataacacagcacggtcttcgcaatcggaataaggatagtagaacagctcatccacaaagaaaggcttttcataaccaaactggtcaccatctgtcttataatcaaaagctgtctgcacgaaattaatcagtatattagcggcttccgattgttttttcccttgtatggcagcttgcaatgatggaagcactgtctgttgtacttcctgactgacaggagctcccacatagacagaaaagtcacattgcggataatccttatagaaggaaataagtcccgaatttactttcgagcagactttgacggatggataagctttcgcttgcaacgttttctccacgtaagttcctgaaaagggttgaggagtagtgatattcatatttaccgggttcttcgcattggcgaaatcacggttgtaagtgtaaatagaattagttttattcggggtagtatcaaacctgtaatagtttactccattcaaagtaataaaacaggtagcataaatcatgttacccgaagcatagaataaagtaaggcggttatccatacgcgccaccttaaccctatatcccgattgagaaaggagaaacatttgcataaaagctatttcatcggaatgagtacttccacatagttcagtagccactttcctcgtcaacagcagataaccatagtcattcagggcaatctcctttttaaaagccagacagtcgtctatcaaaggctgatagttgctacgcgataacgtctcccatccggcagaaatatctttctctgcaatcccttttaaagtgagccggttcttcaatgaagcattgccaacacaatctttactgtagaacgaaaactctacaccggaaagcgagcgtttggccggaacagtttcttcaggcttcacttccggttttatttcagggagcaccgcagaatccttttccggttctacagtaacatctttacctcccggtataaccggaaccggtgttttcccttttgaaggagaaaatgtcgcacttggagtcactgtcggaatggggagtcgggtcacctcccctactttaacctcttgcggttttgttgccggcttcttacggtcaaagctaaccggttttacaggctctggtctttgaggacgtaccaccggcttctgcaagtcatactctttccaggtttctttcagaaattcggcaaattccttattctgttcgctcacaaaatcatcaaactctttttgctgctgcttcacaaaatcgtcaaactccttcatgtctttatctatttgcgcaaaaagactaaacggcaaacacaatgaaaaaactaccatagatagtattcgtatcctatttttcctcatttccttattatattttgttgttctgttatctgccaatccacatacagcttattattccgtatatctttgataaagggggaaatggacaagacagcgacaaccttctcccgatacaaaccacaaccggaatcagtgccgccattgaaacgatcgtccacctgcttgacatttacatcagaaaacggatataacaacagtgccttcaccaaagaagacatataggcattccaaaaggcattcctcatatccatcttctccaatccgtcctgatctccaaaaccggcatcttcataccaacagccttcctgtaaagaacaaatttcaactccgttcatatatgaaattatttgaggagacgactgtgttcccttaagctgaaaccatgactggtctgattgctccctacaactatccgattccaacaataaattgaatttcacctcttcttcctcaaccctttctttcgtaaacaaaagcatcaactcactaatggaatgataagaaaaatcgcaactatcattcgatggagtaaaagatacctccagaaatttctctccaaatatagaagtatattcatgctcaatccggtaggaaacatgttgaacgggatgttcgatcactcccaatacaagcattttgtctctttggtcttcgtatgtattactggcagtctccatggtggaaaaaacgtccgagagaagtctcaattgtaccccttgctgcaatgaatacagataagccgctctttgcaaagcaagcatccttgcagcttcggatttcatacaaggatcagatataccaactacccggcctttccgttgagaagcaaacacccattccggcaaagtctcccgctgtcccggtctccagtcataagattggttataaactgtatcaacaggcattgcctgtgaaaacacatcaataccgggagacaaaagcaactggataataaaaataactacccaattatatcttatatccgacaaattaagtttcatcattcaatcttcaaatagttgggtagttattaaagagatcattactatcctctgtgttctaaacaagctgattattgggcgtttttactcatttcttcttcaaatacctttttgaacttttcatattcaaagtcaatgcgcaatttgtcatcattcttaatacgatttgccatagcattcatgatttcctctcctgccagttcaagagagacatatactttgtatttaccatcaggagtcttcatggttttttcacaaattacacgcgtaccgctcaattcctgttccactaccgtacgggtcaatgattgataacgacttttgctttcatcattttcaccttgctgataagaggaaacataactatcggttaccgatttcacttttgcattgatagcagtagcaatttcagcccgggcctccgtcatcgcttttttctttgcaatagacatatccgtagaaagtcccatcgaactagctctaaaatactctttgttcgtttgaaattccggtcccgaacaaggaacattaatttctacgtcctgttgcactgccggttgctgcactgtttgtgttacaggttttgaactaccgcaacttgtcataacagcaatggttagcaatgctgttcccaataaattaattcttttcatttcaagtcttttttaatgttaatatatgattcatttcaagcctctcaacttcactatattatttttgaaatccttcaattgcagcagtgccacagattgcaacttacttacctcaataaccatctccgtaggcagatcaggcacaatgagcgcagtgactctgcggtcattgaacttagaccccagtttgagactgacaatcggagattcttcacctttttcgtttataaccgtcagatttccactatataagtccacttcgcaatcgtcagcatttgtattcacaatcttaagatgtatcctcgatttgtctcccaaagttgcaagtttgccaaattcaacaaagacaccatccaaccattcaacccgaattgccttttgattctctggtttggcggacttaaccggaaccaaaggagcaggaataacttccggcaccacaacagggacagatataaccggatcagcttctttttccggtacgaaaggaccgactaccggaacaggaacatccggcaacatcttctgtctttccggaatctttccggttctgtcgaatgttattttcttcaattcacgtgcaaactcccggttcagccgttttatcaattcacgcgccgccatattcttgccttgagaagcggacttattttcaggtactaatgtccgttcatcattaatagaataattcaataggatttgccccgtccggttattttctattttaatccccaacgtagaaaagaattcgatgaagttatacagttcacccggaacggtattgcctttacgacacttattatccaatgtaacgataatgtcggcttcagaaggagatgcaactacgttaaagaaatgattgttcagcaaactcttcacagttcgttccaccgcctctacatcgctctgcgcacttctaacataagcagaagtctgtgtctgcaccgtgttgatagtcaacgttgctccgggaagagaagaaagcatttgtttgaataaagctgcataacttcccttccggaacaagctgaacacatcatcaattaatgaaattccaatttcctgctgtgcctgtttagaagtaatattgcgcacataaagagcggcaactcccgattcgtcggtgggagacatggaagacaaatctcccgacccggaaacaaactcggctttcaaccggatattccttaacggatttccattacggtaaacacctatagcaataggctcccttataccttgaaacggcgtgactgaaacggttgccggattcagaacaatcgttattccatcaaatactccagccaaagccgcatatagttcggtcgccagattaattgtctttccttcgtaagagcagaacaactcctgattaagcaccgggcgtatagcctccattccatttgagaataattcaatggcagtcattaaatctccctgttgtaaagtaatgtgtcccttataccaaaaatcgaatccgttacggattgccttctgacgacgtgcttccaccaaggctgcataatcgcccttattcaattcataataaacccaatactcattgtcacttcgccaggaatccaccagacgaaagttctctatttccgcccgggcttctgtacgaatactttctgcgaaggttcgtttcacattaccatcgtcctccaacgtattcaacaaagaattggcggcaatcaccacttgaatttcagatacaagatcagacaaagcgttttgctttgccttttgctgataatctccttccgatatttcagccattcctattccgatgtaacttaaaccactaacaggatgctgtttcacccagtcaggacggttcgtttgttgaccggaaagcggaaagcaaaaccatgaaatcacaagaataaataaaagccaatgtttcatacgtccttgatttattgaatagtcaaatagatggtgcttccatccactctatgttcactatctattccggaatcattcagataattaaccagattatctgcaaacgtgatgcaatccatcggcaagccgtcgctgtcctttgcaggaatctgtatcgaatcaaatatcagactatcgtccacagcaccttgaatatggtagcgtcctccctgggcattttttcgtacccaattgcgtatatgcgccgaaagagtagtactaccatttatctggctattcatcgtattgatagcattatctgcgagactaacccgaagaacaatcgtattcccctgttgaactttccgggcaaactctttcgagatatctttcagaaaaccatccagaacatcttgtgccgcatatgcgcataacttatccacgtccgtcgtcctaaagcggttcgtccagcttttccggctagccaaatctactccggtagccgtttcacgagcagtcataatcaatgagactctacttcccgaagctgcagatatgtctttttgtaaatcaacaatcacatagacgtccgctcccgaattcatcaacaactgcttatcattggaatcagcattcttactttcccattcggaagcacgcaaagttcctgactgttttccctcggcagccactgtcttcacgccaagcttaacaaatctctcctttaccgtacttacggctatacgaagatcaaaatcattcttcagaatatcagcgtatgagcttcggtcattgcttttataggggactaccatgattgtcggcaaagcaatttgttgccgggtttcctccatcgacatttcttcctggggtctcgtcatcaatttgttccgtatcaagtcttttttaagcgcacctaataagatttgagccgttactgtaccattgtatagcttggaagattgccgtaccggatctcctaccgtttcatagttcttcacaaagagcatataacgtgaactgaaaaactggttcatatagtaagaatcttctttcccgacgagcggcagtccgttttccactccgtcaatgccgttgagaaatatagcattaaagatcgacttcaatgccatattatatacatctttctttttttcggctgttccggaagcggtgataacggctatgttatcatctgccttcacacaagttacgtcattggagtatgactcctgtgccatgaaatgaatagtgtatacaactagcaggctcaaaagcagtattcgtaacttcatcatagtccaagtccgcctaaaaaggtattttttcgagaaagaataatcaatttcttttcttctttcgatgctttcattatctcctcaccgcctttgctcacggtacataaagaacgcgttccgctcaatacttctttcacattcaagcgtccgacttctttcaatgacagttctccggcaatatccatctctatgtaaacgataaatttctggcctttttgtacccctctcttagttccaagatcgatatatacagtttgtgctttatcttttttggtactctcaatctgtacaatcgttcctttcattttgaaatactcgtcaacaaaatcgtccatgcttattactacataatccaaagtcttaatgattgcttcatcaggagtatcgccaatattcccggtcagcccctcgtgagtgaatgtctgggttcctttgagtgtaccgttagaagggtctactattttcaacgtgtaagaaacactcccctgataataggtcttccctttactatctgtttttttaactccctgcatactggtaatatttccctgaataagatattgggcgcctaacgttgtcatgacctcgcttctgcaaacggcatctcccatagcagaagtctcttggcgtcttttcgcttcagtcttcaatgcttcattagaatcaacatcaataagttctacacgatccatcttctggataccttctattactttattacgcaatgcttccgccaaaatattactgatagtaccgggacgagagaaataatcaatatagactctttctttaccgttttcatcggtttgtgcatagcctaacattggaattaggcaaatagagaacaatagtaaaatcttcttcatgtctgtttattatttattattaatgctatgtttgttttttagtgcaatatttcgctcttttaatacaatatagaatgttctttttttaataatgatttactgttatgaatgattgtgttttctctgactgcaaagttaagcacacattaaggtgtattgtatacacaatatttactacaaccatccgttaaacgaatagttatctccaaatatcaatgagaaaagggaaaagagtggtatgttcaataaaacgaggtcgttttcccgtctccaagctatttgcaccatcgcattttccacagttctctcgaataagtataaaatagcatttgttatatccaccaaaattgttacatttgtccaataataaattgcttcccaataacaagatacatggaaacagatttaaagaagatagtaggacatcggctgcaaatgcttcgtatggaaaagaatcttacacaagaacaaatgggagaaaagttgaacttatcaacaagtgcctattgtaagattgaatatggtgaaactgacctcacgttaaccaggctgaataaaatagcagaggtactaaatatgtctgcattagaactatttaataaaatagacgggaatgtgtatgtcaataattccggtactatcggaactaatattggagtcgctaaagactgtagtagcgtgcatatcgaagcggcagatgatcttcgtgagctaataaaagcaaacagtcggctccttgacatgttatataaacgtatagagcttttagaaaataaagtgctcttatagtgattatacgcctagagaaatctctaagacgatgtatcgcctatccttccgtcttccagaatcaggagaggaaaggcatatcattttaggaatgacaccggaacaggaatagatatagttaactatcaataaaatacaaatagaatatatgtcaatgccaatacgatcaaatataatccgacttcatcttttcagttaatcttagcatatacactttttgttgtttataaccatcaggagaactataatttgactatttataaatgatcagtttaggttcatagcaagagttgtagtggtcatcaagtattgccccatttgagaaaatgatgtgctcatccttgaatgtaccatatccttcatgagcatgaccgaacaaatgataatgtggctttacctcataaaccttgtttcgaagtaatgcatttccccagtgaattcctgctgattcatcaagtatcatgataggaggttcatgagtaatgagcacatcaacatcatttggtatcaaagtctcaggatggttatatgccaaaccaaagaacttaataccatcaatctcacattcacaatcttgaaggaagtatacattattaggcaaatcttcaatgccttcagcctcccaaagacaaaggtcatgattaccagttatgaagattttgtgaggatagggtaattcgatgaaccagttgagaaagttaagcacttcttcctctgtaccattgtccgtaaaatcgccacagtgtacaatgacatcagcagctggaagatcggtcaactgccgatgctgattatgtgtatcagaaatttgaagtattttcattttacagaaatatgaatgtcatgtatgtcaacatcaccttcgtcgaatataaagtatgaagaaattccactaatgctatcatatcgtgagttctcatctttatgtataggtatgactccaatacgaggatgaacagtttgacagacttcttttaatgtttcaacatcagcgtgtccacttgtgtgaacaccatccattgttccatctaatattctatcgccaaacagattacggatatttataacatcgctgtttgtgtagtctttaccctcttttgcatagccaccccacatagaatatatcaaccacggtttttcatcattatatatatcgagcattcccttaagcaaatagccactgctcattcgaattggcattaagaacccttccttctgtagcttgtttctaacattgacagttctataattgattagcttgaaagcattaaactggaataaatcagatttgcatcctgcatatttcgtgaatacattaaggaccctattttgatactcatcaactaagaatatacgtccagtctttttacacgccgcatggaatgttgcaagccggtcaaggtcagttgacgaacacaaggcaaagacatacttgtgttcacgcaatgcctttataatattcttctgtatttcgctctctgaaatcacacattcttgacttcttcctaacattgttccttctgttataagtatgtcaacttctcccacattcttcttcaaagtaggaaaaagacctttgccaatatagccatgtctgcgaaaatctcctgtgtgcaatatcttctttccctcacattctattaagaacatatatgcatcaaaagcagaatgactaacaaaatacggagtaacgaaaatcttccctttcttactgacatcaatacgttttgccgcacaataggtttccatacgctctattgcttcaatctgtttggagtaatctccgtgccccctcaaagcgtcatatttgcagagcataacttcttttgctcctaatcctatatattgaaggacatttgttggtatcagatggtgcaaaccaacatgatcactatgataatgtgtatagaatacggcatcagcatttcctatgattgattttacttgttcttctgtcagttcttcttttttgcaaccaggaagattgctaccgaagtctataagaattttacaattctcagtcgatatttctgtaatacaaccacctatctggtcagccccacgatgaataataagattcattctgtttctaagtcttttgatataacgagagtacccttggatgtgcatgtgtatgctttcatttccggcaaaaataaatcacgaataaatctatatctttcgcggattgtttcagatagttcaccgtcgtctcctacaattacacacggtattattcttccggaaagctttaatggtattttatttttgtaacaggaaccgataagtccataatctattttttgctcgatcattgcttttattcgttgatacaacttatcatcttctttagctaatttttgaaactgtagataataatatgaagtttgaataggagacaatgcagtcttagcaggatcattttgtttaagttccattatcaatatatctccattagtatttagaccaaggaagtcaaattcaccatactcaggttttatattttcaggaagttctccattgtacgtttttcttaattgtttaattttcaatgtttgttggtctacaatttccttattccattcatcttttatgccttttgttttaaaaccgataactagttccttgtcaaaaagaataaaatcatcagtatctttaattccaaacgtataacgacgtcctattaatgtctgataatatccttcattgtaaacatctgtattatagtatcttttgaacttttccgcggaagcgattttcgctaaatatgtgtcaaactgatccggtgttggatttctaaaaaaatctggttgcattaattctttgtaagcctcggctacatcacatatttcattaactttactcgaatgactacgaaaggttagtatacgtccagtacctctatatatagaaaaccaagaacgattagttttaggatcatttccagtctggaaatctaaacaattatgtgatttaacataactgatgatccaaggaaaccgctcatttatttgggttagcaacttttcatccattttcctatcgtaataggttgtttttattgtgtaattattaaccattttcaatttcttcatttagagtttataactatgtattattgatctctgctaagactctgcacgccattattttcctatttatatctatttatggcagcaaaaagtcgttttctaatttcttcacgcagccctattggttccataacttcgatcttttcacccatagcaagtagctgacttgttagctctggagttaagcaaagttggtattcaaagtcgctgtactctttgtgttctgtttttatctcttgttgagagaaatgcagtggcagagaacgcatatactctacatgaacaccgaatacccgaacaactactttctgtggcttcaatttgtcattgacaaatatgccaactgtatgagcataatattcttctgcatcaaaatcattgggaagtataaatgagtcatctgtcaattccatttccaaaatacgatcaagggcaatattccttattccctcctgctctttgagatagccgactacataccaacgctgatggtaaaccttcatagcgtatggctgcaagtgaaatattgactgatgaccattgaaaggtttataatcaatcttcaattccttttttcgttgcattgcatctatgactgtttggagatattcagttccttcaggaatttcctcaaacaaaattcgatctttcatgttgcgccctgcttctatcatgttagacacagtgaaggagttaagcaaccactgacgagtcttgtcatttttcagttgactagaagaagaaatataatactcatagctggatgtatcacattcgacctctacaccaaaaagttctgcaatagcttctctatgcatgtggaatgtacgtaatgcaagcggtctaccatcaccgagacaactatctttccatcgacagcttatctcctcaaaagttaatctgcgatgctgaagcagcgtgttgagcaaccagatatagcggttgaaggttttacttatcattttctaaacttccgtgattttcaaaatattattactattttttattattcaattgcttaaaccctttttgtatatctcatctaattgtttttcctactttagatatcttgatagcatgttttatagggtagaattcataatcttatttagtacaaagttaacttttttgtatgcaaaaaaactgcataccacctaaatatattaatttatagcaattttttttatgtgtgcaacgtttctgcatacttcaccattatttttgcacactcattttaacattctattcgtcatggcatacaaaaaaaatccaaagaaaaaagatgctctcagtataaagagagctgtagaatctctgcgtttccaaattgattggggtttaaaactacttggcgcagagaaaggagatctatttcatcaattagcaaaagtagaggttgatttcatctcagagctcaacctcacccaagatattcttgctatcaagagcctcgtggatggagtgaaacagaatttacagatagagcccacacctgaaagtggagacttcacccatagtgtcgttgctctcgctcttggcattgccccaattagccaccttagcaacataagtttaccagagtcatggagagaccagatagagaaaaaactacttacaatctactatccggaaaagctgcgtaacaaagtcgtagattgggcaaaagcgaacggttacagcacctccagctaccttggccgtccaatcgtgaaattcaagcagttgtacttaattatagaaagaacaaaataagtccgctttttttgctctgaccatcgcattttttacaaaatacgctcattccatattaaacattccattctactaccgataaatatccattcaattacaacacataagaattttcatgatcgtctttacattgaatttatacgcaaaagaaaggggctgtctaaaaagggacttgttagacactcccctaaaattctttattgagttacctataccctaactcttataagaatctacgcaaaaatatcgcttcgtagaatataaccgattacatctcccttatgtacagtcgcaccttgctgtgcacatatctccaccacacgtccggtaaatccggttagaatcttttcatattccccccacggagtggaaagataacaaaagacttcgtcatgctgatatttacgcccgatgaatggagcaatggatggtccctctacggaaacttcccaaagtacctgtccgttatcaggggcaataaccggatctgccttggcacgtttcaacttcttaatttcctcttccgaatacccgttctttgccattgccgcatcctttgcatgttgtaactcttcctcaaagcgctttttagcaaccccggacttataatcacgatattgacgatcgtgcatggccagttcgaaaagctcctcgtcatcctctccatattcccagccattttcatccatttcctttcgatattcatccaaagcatccggataattcaactgcgggtcggtatcgacaaattcatatcctttagatttcgccaactctataatctccggtgcaagcgtaccaggaagacgtccacttttacccagaatcatatcccaagtatggttatctatcattgtccaacgttcttccccttttacctgctgcataagattcattaatgcaacatttttcacatactggctgaaaggagtcaccaaaggaggataacccagcttgggccatacatattccacttcatcaaaaagcatcacaagcagatcatccagactaagttccggctcattcttactccttaatatcatattgatgccggaatgcactcctttcaggtctgccatcatggaacccatcatgccacccggcaaaccacatttcagtagaagcgaagacatatatttattggtaggatccataaaataacccagaaaatcatcaatgaattcttgcgtcatcgcacgagctttcatatatgctttcatatttatgtcgggaacctggaagcctaaatctttcaacatagcttgcacagagattacgtccggatgcactttgccccaagacatcggttccatagccacatcaatgatgtccgcaccattttcgcaaacctcaaggatagaagccatagacaatcccggtccgctatgaccatgatattgaatcaatatatccggatgtttctccttgatagtcctgaccaattctcctaacatacccggacgaccgatacccgccatatccttcaagcatatttcaggtgcaccggcctcaatcagttgatcggcaattcgggcataatactcaacggtatgcactggagaatacgtgatacaaagagttgcctgcggaatcatacctgcttccaaagcatatttaatagaaggaatgatgtttctcgtctcattcagtccacagaagatacgggtgatatccaccccttgtgcatgcttgactttatacattaatttacgcacatccgccggaaccggatacatacgtaatgcattcaaaccacgatcgagcatatgtgtttgaatgcccgcttctctaaaaggtgcagtaaaagcacggacagctttattaggattttcgccgtacaatagattcacttgctcaaaagcacctccattcgtttcaactcttgtaaaacagcccatctcaacaatcaatggagctatacgtacaagctggtcaacccgaggttgatacttaccggaagattgccacatatcccgataaacaagactgaatttgatttcctttttcatcatagtcaataataagtgattttttcggttaacttcacatatacaaatataaaggtttgttttgacatatagtcaaaaacaacctttaaaaaatgggtaaatagagatattttacatcataatgaaagcaaacaacgtctatattcttccaactataataaataacaaatcaaattgtctaatgttcagatatatccccttaagaatccaaaggcttcacgaagtttattcatactaaggtttgcacgaatgcaaatcgcttttcaaagtcatcattcggtataaaaagggtaagataaccatcaggcataatccatctatcacgaagtttatcatattcaaaagtactattgcaataattaatataagatgttacattagtggagtcattaagataaagaatagatttattacagatatcattttctaaaacacaaactaagacagcattgtccactacaatttcaatgcctttacttgcttcctccttaaacaagtattcatatatacacatctcttttttaaaaaataatctttgaatgcggctacttgtattagtgagcacgcttcttcccacatacagtaaattttcaaagtgtgaatgcaatttaagagtatccatttcatcatttttttattgttattactctgctaaatattttatgactgatctctctcatttaagacccttgacttgccaggtataaattattctccaaagtaacatattcacattcatatactcacaatcatatatgattgtatgataagtttcaattaaaataaagaattacaagaaaaaacatctacccattcaagattacacaaataaagatgaaatgagactgtctttaataatgtagtgattattaaccagacacacaaagatttcgtatatttctcatttcaacacaccgaaaaaagtttatcttttctgcataaacgacttttgagtttctaataaactctcaacaagtttattaaaaacccgaatgtagctttcagaaggatttacgttgaatttatgcaacaaaaaaggctacaaaccctataaaaggttgcagcctcaagcttttaatcgggtcgtctataccctaatactcataaggatctcctagatgttttgttataatcttatactgtttcatcgtcaaataacgatgattatacggcatataaccagtcggtacaagctctttggtcaacgggttacagtctttaatccatcggctcagacaacgcactgcatttttactggtcgtacatccggggaagtacaatgcagctaatacagcaaaagataagattcgtctcatttcgtttttaaagttttaatttgtcgtttcattgtttctttcgttctacaaatatacaacatcaaaaagcgtttgtcaagtcatttgggattttatcgttaatataaaggaatacccacctttattaacccaattactaagcaattgaaacaaattgagcattctcaatatttaacgctagaattaagtctaatgctcacaaaaagaaacttaaaaatacttatacgaaaatgacaatctttaaatcacaagaaataacatgtttatattaaaaagagatacatgaatggattgtgatttacttttaaattagtaactttgaaccattggaaacaatagaaattaaaaaaaaagtcagccagcagagttgtgatttgctttcaaattagtatctttgaaccattgggaacaattaaataaatgttccatgtctgccatacctgttgtgatttgctttcaaattagtatctttgaaccattgggaacaattgtgacgtcttagaacctttcaccgctgcggttgtgatttgctttcaaattagtatctttgaaccattgggaacaatcggttatagcccaatatagagccttttccgttgtgatttgctttcaaattagtatctttgaaccattgggaacaattgccggaaagatttccaacgttaaagaagtgttgtgatttgctttcaaattagtatctttgaaccattgggaacaattagacggttacaagtccgttaaatacagtagttgtgatttgctttcaaattagtatctttgaaccattgggaacaatttttttgggaaatagttttgtagttcaaagttgtgatttgctttcaaattagtatctttgaaccattgggaacaatcgtagtgtataagataaaagacggttttctgttgtgatttgctttcaaattagtatctttgaaccattgggaacaatgacgcgtaccagaaaattacaagagtccggttgtgatttgctttcaaattagtatctttgaaccattgggaacaatattggcttgcggcgaacggtgtgaagtatggttgtgatttgctttcaaattagtatctttgaaccattgggaacaatgcttattgattcttcgcttatcagcttctgttgtgatttgctttcaaattagtatctttgaaccattgggaacaattagaggcaaaaaaagccgctgcaaatgcacgttgtgatttgctttcaaattagtatctttgaaccattgggaacaatattactcaatgataacgatgagagagaaggttgtgatttgctttcaaattagtatctttgaaccattgggaacaatcgaccgcggatcggtgtgaacttgttagacgttgtgatttgctttcaaattagtatctttgaaccattgggaacaattgtggcaatcgatttcccatatactgatggttgtgatttgctttcaaattagtatctttgaaccattgggaacaatccaggatgtcccgatttccgcctgtatctggttgtgatttgctttcaaattagtatctttgaaccattgggaacaataaagccaaatacgacgccgccattgccatagttgtgatttgctttcaaattagtatctttgaaccattgggaacaattgaagcaccggatattctgaccacaattgtgttgtgatttgctttcaaattagtatctttgaaccattgggaacaatacatttcatataataagatgtaattcaattagttacaaagaagattagaaaagaaaaaagaagactgttcccaacacaaaatctcgcattaatgcgagattttgtgttctaaaacaattccaattgctgccttggtgtattgacactctgcgccttctttccatagaaaagttctatgtccccaaattgtttatccgtaatacacatgactccgacatgccctagttccggaagaaaagatttaactctttttatatgtactgctgcattctcgctactagcacagtgacgtacataaatggaaaactgaaacatcgtaaaaccatctttttgcagattctttctgaaatccgcataagccttcttttccttcttcgtttcagttggcaaatcaaaaagaacgagcacccacattatacgatattcactaagacgatccattaccgttcgggataggcaactcggcgaagctctccattgaaacatttataaagtgaggcagtagtttgccccacagcaatcatcaacggactgcgtttacctccaattattacttccaatgtcggaataataagcaatcgcgttttcacctctttcgttagctccacacccattccatactcctgtatcaagctaaatactaattcatccacataaggacgataaggttccataatatcatccgccaagcaataagcattgtatcgattatgatgatggatacccaaagtaggaagtaatccacttattaccaacccacgtgctaccactgcacgaagaattgcatatccgtagtttaataggttatttggaggaataccttcacgatctcgcgtaaaaccgtcaacatctgcaaataaagatttccaataatatgcagcagcacgtgcttccaaattatcagggtcgccactacgtacatcagctgcccacacgcgcatacactttacctcttcattcatacaatctttgagcacagatgcttggttgttaatcttcgcctgaatagtttgttgccaaagttgtttcttcaacggcaacgaagcgtctaattgttcacgaaaacgctcattctgcgttgtatttccataaagaggaagcatcagtccaactggcatactcttactatcgcaagtgattacagagcaagtgttttcaagcaaagcctccaacacaccggaagtgatggtgatttgcttgttatccaaaactacaatgccaatgtcttctataggttttgtcacttccgcctgctttttcaatacttccggtaaggccgttgctttttccacatcaggcaatttaataactaactgcgcattgcgcaacgacagataaaccggatttccgaaataaagtgttttcttaatcatgattcattcctttcaaaagtttatcaaagtccgattcgtaattccgaagttgcctagtatgaaacttgtcatattcttgttccgccaatgctttggcgacctcatggctcacctgcccactatgttgcaataccgcttcttcgttaaattgcaagaatgcatctagcttcttcacccaatctttcatatacatcacctgtccttttttcgcttgacgttctgcataatccaaatacatcgaaacaatacgattcaaatcatccatttcagtttcattgagatagttctttgcgatggatacatccggtttacgaatcatcccgttaggcgcatttttccaagtagtcaatcccatattaggtttctctgcatccacacgggcaacaattatctccgctgccgtctgtccggaaattgcccaatgcaacttattctgaacagttgcaaaaaacgtctttgtcacctcgctaccagcttcgtaatcagcactacattgcgaataaatatcagttatcttctgataaaaacgacgttcactgctacgaatatcacgaatacgagccaattgctcctcgaaataatctttgccgaatagcatttgtggattttttaatcgctcgtcgttcatggcaaaacccttaatcaaatattctttcagtacgctgtttgcccagattctaaaatgtgtggcctgaatgctgttgacacggtagcctacggataagatagcatcaagattgtatagcttcgtttgatactttttaccatcagcagcagttagtgcaatttttgcactaactgaatcctcctgcaattcagccgtttgaaagatattcttcaaatgttttgtcactacgcttctatctactccaaacaattgcgcaatcttatcctgtgtcagccaaactgtttcattaaaaatatagatttcgactttcacttctccattactgtctttgtaaagaaagaaatcagagggaattggggtgttattgtttttattcataagccagatattcctttaatatttcctaatcgatcaacttttagttttatacaaacgtctttaatcatctcgccagtcagactccttccaatcttattcaatgacgaatattcaactttgtttactataggacttgctacataataaggaacaaaatggcactctgaacctgtacaacttaccattttataaattctcttccgttgttcattattaagttggtccaaattaacagcgtgaatgttttctcgttcatcctctataggcacatataccaaatcattaggagataaataaaataatagactatgttcctttctatttttttccggaaccacacttaatccttgttttaaacgttctattacgatatttaaaggtatagtttcataagaacgaataccattttcatctacatatatagcaaagaacaaattggttccctttgccgcttccacatatttgtctttcttgtttccttttactccaacagagaatttattaccaattgtttcataaacacgaactttaaatattggaagatgcaacttcccttcattaagctgaatgatattcttgttcatctcctcaataccttcaggagagaacgcaatttcaaccttattcccttttgcctctaaatgattaagcaagattttttgtatgccagtgtctgttacagatccttgaataaacttttctgtaaaagatgtatctacattttttcgcaccgccgcattttcttcatcaaaataatacatttttacttttgatacatctacttctccaaactggtacttccgatctttaaaatatcgcaagattgtatccacatcaaatttaccatattgacaggtaagccgttttatttcttgttttagctttttatcgactatctttttccaatcttttaaagcctcactcaaacgcacggtttttcttttacgaagtgatacttttgcaaatacagtttctttgtgtagaggtttacgaattgcccaattaagacctttctggcctacctttatctttttaccgttttcatatttcgtatatatattggttgccttattaattatacgcaggttttgtttaaagctaacaataattttttccaattcattacgggcatcaacagtgaaattatcccatggctttttaaattctttcggaatatcttttgttacattgttctttgtttgcgggtcaatatatgtcactcgctcaaacaatcgtaattttcgttgtaaatcatatcgaattgtatctgtatttgcatgtttattgtttaacagattgacatggtcacgagttgcacaggctattaccaaagcatccattgcatgatgccgatgatcaatacgcttcttttgaaacccttttgatagttctaatggaacagtaggcaaatatttttgatgttgttcattccaactggtgaatgcgatagtctttgccaactcattcatccgcacaaaacgaggaagaatcaaatcattccaaacatcattcaacccccaatcttgtttcaacatagttgtaatcttgccatttacaggaagtacattttttgagtttactccattgtcattttcttttgcacgtacaagatttgacaaaagagggagaacaaatttgctgatgtaacgtgtatcattcatttggcgttctatcatcttttcaggtatttcttccaatagaagctttgtcctcttggaatgattataagcataatgctgctttacaaaattctgatacgcctcctcatcaaagatagttactttttgtccaaagcctgtttccacaatctgcccatggtagttttttataaactccaaccctaaacatttatccttcaatttatttacagcggcctcacaaattactttattactgaaactatcatcatagtaacgagattttggaatgatatgctcaatctgatattcttcggtaaagagcttccctaacgggatgaccttacccgtatatggagaacaatatttttgctccaaccatagtttgtagcgttgtagttctgtcgttgtgggttgtgcaaccctgcttattttctttatatcttcctttaccttttcatccttttcgttatcaagcccagtgctaattgcatactcttcatatattttcagaatatcctgttgcgtgggtgaataaggacggacattttcaacctccaatttgccatcagaattattctttaattccattaataatgctttgattcgcaaattggtattctcattttctgttacaacattaactatttttttcctttcgtcagcagtgttcttcatatcacgtccaagctcaacatggatttcactaaaaaagttttctgctccttgtccgtattttcgccaaatatctctcactacccgtaaagtttccgtaattatttgttctacaatcggattacgtaaggaatgctgtttaaactcattcaaatacttttctaaatcagcaaccgaatgccattttcctgcaatatctgcttctgaatgtcgcccataaacaagatattgagccaaccataactgtaaaccttgaaaatcgttttcattagttaaagcaatagacttttcacgaactatatccttaatttcctcatcatactcgcctgtgattattttggatattctattttgggtattattatcaatatcattccatttccagtatttccccaaacgcatcaaaggtaacagtttctttattgctttttcggagaatgatccatattcatttttaaaaggaggaattttcttgaaattatctacaaaagaagcaatatctaaatcatacttttttgcaaaagttctcaacgctttctcaaactcatttttatctgtaacagaataaatgatatgccaaagtttttgttctatttcttttgtaaagaaattatctggaatattttctactttagccaaacgtgtagaaatcatcgtttttgtttcactgcaaggatatatcttatcttcaacataattccatcgatatgcctctgtctttacctgttttttcagaccttttgcctttatcaaatattcaagcaaaggtttctgttctatacttttcctattacttaagaaatcaaatagctgttctttatcttcaatgtttgcaataaattgcaaagtaacatcttcgtcatcttccttccgatatatcttcaaattgtacagccattgccatatacggaattcctgataaagaggattggattttgaaatgaccttcagatactctttaatattatttccatctttatctttgtatgttttaaattcaagtatgcaatcacctatcgcagacttctgactccgtaatggtctctgataaaataaaatatcgtccaagaataaatgaacaaaatctcttttacttaaaataaattggtacgtctcattactccgatataactctcttacacagtcgttgtataaatcttcatctctcaattcgggatgaaactctctttgtttctcaagaatttgtttcagttcatccttgtagaacttacgttcgattgtccgtacaagctttccacgaactttttgcataggattttgcagtaatgtctcatagacatacgcaccaactgttttatgagacttttctatatcactctccgtcttctttttcaacaatacccaatcattttcgcttggcgcacgaaaagaccgcttttctattccttccttatcttttttaaccgtcccgtcgtcgttcaaatctgtagtaacaataaaatcacgtgttttatctttccatccaaataacggaatcttactggagcgacgataaatccagccgttttctaaatgtaaagaataccatatatcacttttactattcggtttttcatcggctatgacatccactattttcaatgaataatattctactaatttattagggttctcttcctcttcttcccctcttaattgataatatccccgtttctgattgaaatttaataaaatccaagctagttcttccttctctatctcttgagaaagagctttcttacgcaaataatagatagtccaatcatatgggatttttttatcttctctaaccacccccttattcttaaattcttctatcatttcattaaaagactgttgaaaaataaactcgaacctcccttcatcattttgtttccaagctagtttgggctccttttcatcaaaaaattgtcctaatcgcttctcaaaatctatttgagaagcataatgttcgggtaaaaacttcatcatattcaaaacacgaatcagacgctcacgacgtaataatgctctttcgcgcaatcggcgtgtgccacgatagaccgttcgcgcagctgtttgagtctctaccggattccccccactgaaagtatccaacacaccctgatccataggaataatccgactacccattcctaaaattctctgctcttcgctgtcaaccaatgcccaaccaatactgttggttcccaaatccagtcctaatattcttttcatatttgccctatcttattataactcatcaaatatattaatatttttccacaaattagacattaaaacaaaataaattactatctttgtcacactaattaaaagcaaatcacaataaggattattccgttgtgaaaacattcaaggtggggcatttgcctcgccttttttgtactactacaaacaaaacatcccatatcagcagataggttatatcatccttcaacaccaaattcttcgaatgaatcacataatctccttctatacatttatgagaactttttgttgattttccccaatagtcctcgtaacacttttctttattatataaaatttatgctccgtagtgacaagcattagtgttatagcattctcataaaagcattcattggtagtcattgaatttgacagcaaaaaaatccaccatggctattatgaaaagatgattctatatattacacagcaacatacaagtacacattttcctttaaaaggaacacctcgttggttttaaaggaacgatgccttggttttaaaccaacggggcgttccttttaaaccaacaaagcacttattttaagccttatttcacgaacccttcgaatgaccatgaaaacatattcaagaaagcttgcatttctttccattacttaccatgaaagtgccaaactttatccattagaagtgcgtcgtgtccgataacagtgaaaatcagtgaaagaatttaaaagagaaacaaatacaacagaattatttggaaagaataagttgaacgcttacatttgtcatgtgatttttttcatagtattagatttaaggttaacaaaggttggagcaaggcgttgctcctttttttatatccatatatgaggttagtctatacgagttaattcaataactgatacattcctcctgccaatacacgaactactcctttcatttccagttcaaaaagaatagcatttatcttatgtacgggaatatctgcttctactaccagagaattaatctgtaaattcccctgtttctccagaatagagacaatcttctgttcttcttcggacaagtcgagaaaaagactacgttgcacatttactttttcggaagaagttgttggtatattccatcccattgcctgtacaagatcttcagccgataatagtaaggaagccttattatctctaatcaaccgattacacccctttgaatattcatcatttatccggccgggaaaagcaaaacaatcgcgatgatagccttcagcaagttcagcagtgattaatgagcctcctttttctgccgattcaatgacaaccgtagcatcacacatacctgcgacaatgcggttacgactgacgaaattatgtttgtcgggattcgtaccggacagaaattcggtcaatagtcctcctttttcgagcatatcaatggctgttttccgatggacataaggataaatacgatccagaccgtgggcaaggacacctaccgtaggcagatcattgaccagcgcttcacgatgcgcatgaatatcgattccgtaagcaagtccactgaccaccaacacatcaggacaaagtgttttcagatcgcgtaagaaagaggcgcaaatccgggtaccataatcagtggcattacgggttcctaccatattcaggatatgaagggaattcaaatcggtatttcctttaaagaaaaggacaataggagcatcttcacattcccgcaaacgagaaggataagcctcgtcatggaaagtcaggcaggagatccggttcttccggataaattcatattcctgttcggcacggatcacagcttgtggacaatccaacgcatctaccacccgttgactcacttcaggaatacgttccggtatttctttacgcagacggaagacatcaacagcattattcattccgtctatcagatgtttcgcccctatgtgcccgataccgggcaccattgtcagggcgatactataaatctgttcttcctcggaactgctcatttcaggtaaggggcaaagacgctatcgaataattcgctgtcactcaaacgtccgtttaccacacataccgtttcaacagtggatttcactactactttattatcactcttacggaaaatatcctgatagaatacatatttgataccttccttcttcatatagagtttagagacaaactcgtctccgcttttcaacggcgttttgaatgccatattaatgcgtgccactaccggatcgactccctgttcgtggagtgcagcaaaactgatgcctaccgacgtcagaaactcatggcgggtatgttccaaataatgctgatagttcgcattattaacaatcccttgaaggtcgcactcgtaatcacgcaccttcatttccaattcatagatatagttcatcaattaaaaattgaagattaaaaattaaaagttgagaaatagcagttagcctcttttttgctcaatatcgagtcctttgaacttcttcagttcttcggttgataccagtttatacagcttgtcactggggcgtatcttatctgatttcatggagaagtgctggcctttcttcacagtctgcacggattccaagtcaacacgggcttcttccaaagtcatgaatagagcacctgtggtcggtccggtaatgagaagtttatcgcctacgctaacttccgcagcctctaccagaaattcggaaactccaatgttagagaagtatttgatacctttacctacatatatcttacgttccgtagctgccgagccatagtttctggtccattcgcctaaacgttgtcccaaataatagccatcccaaaagccgcggttgaatactgttttcagacgttcgtcccaagctgcaatcttttcatcggtaaatgttccttccagataagctttgatagcctctttgtaacattctaccactgtacgtacatattcaggtccacgggcacggccttcaattttgaatacacgcacaccggcatccaacatcttattcataaagtggatggtcttcaaatctttcggtgacatgatatattcgttatcaatatccagttccacatccgtctctttgtcacggactgtataggaacggcgacacacctgcatacaagcgccgcgattggcagaatggttcatctcatgcaaagagaggtaacatttacccgatacagccatacaaagcgcaccgtgacagaacatctcaatgcgaatctgttcaccgctcggaccacaaatatgttcttcctgaatctggcgatagatttcggctacctgctccagattcaactcacgggccaatactaccacatctgcaaattgtgcgtagaattttaaagcctctgcattggagatgttcagttgagtggaaaggtgtacctcctgccctatctgacgggcatagttcatcaccgccacatcggctgcaatcaccgcagagattccggcttccttggctgcatcgacaatggtatgcatcaatggaatatctttatcatagataatcgtgttgaccgtcaagtaacttttcatcccgtgttcatcacacgtacgggcgatctcccgcaaatcatcaatcgtaaacgtattggccgaacgggcacgcatgttcaggttttctataccgaaatagatagaatcagcacctgcctgaatagccgcagcaagagattcgcgcgaaccgacaggagccattatttcaaaatctttcaaactaagactcatagaatatatacttatttgtatcagttaagcaaatgaatgcgtacaaaggtaggcttttttccgtatttttgcagcgaaaacaagaagttacttcaatcataaacagtaaatatcagattcatatatgaagataggccaaatagatttgggtaaatatcccatcttacttgctccgatggaggatgtgactgatccggctttccgcctgatgtgcaagaggttcggagcagatatggtatacaccgaatttgtgtcgagcgatgcgctgattcgcgctgtcagcaagactgcgcagaaactaagtatcagtgatgccgaacgtcccgttgccatccagatatacgggaaagatacggaaacgatggtggaagctgccaagattgtggaacaggcacaacctgatattctggatatcaatttcggatgcccggtaaaaagagtagccggaaaaggagcaggagcaggtatgttacagaatatccccaagatgctggagatcacccgtgcggtagtagatgcggtgaaaatccccgtaacggtcaagacccgcctgggatgggatgctaacaacaaagtaattgtagagctagcagaacagctacaggattgtggtattgctgcactgactatacatggccgcacccgtgcacaaatgtataccggagaagcagactggacattaataggcgaagtgaagaataatccacggatgcatattcctattatcggtaatggtgacgtgacgacgcctgaacgcagcaaagagtgttttgaccgttatggagtagatgctgtcatgattggtcgtgccagctttggtcgtccatggatattcaaagaagtgaaacactatctggagactggtgaagaattaccaccgctaagtttcgactggtgcatggaagtgcttcgccaggaagtggtcgacagcgtaaatctacttgatgagcgcagaggtattctgcacgtacgtcgtcatctggctgcgagcccattattcaaaggaatccctaatttccgtaatacgcgtattgccatgttacgggcagaaacaaaggaagagcttttccgcatatttgaagaaatcacttcccaacgtaaagagaatccggaagtttaatctactatagatcataatcttcatccgcaaactctgattcctgcggatggagattacctgtttcaaaatacagaagtatattccaattttctacttaaacatcggttgtgcaaaccacttcttaaacatccaggtcacaaccacatacaataggaatgcagagaaaaaccctacaatggcatcaatcacataatgtgcctgaatatatacggtagccccgcaaagcaacatatagaaaggtatcagacaagcaaacaatttcttgctgccacgccatgccataatcatcaaaatagtagaaataccgacgtgtgaactggggaatgctgccgtaggacgttcgcctacctgctgtgagccttccactaagctataaaagaatccatgctgataacccggtccgggaagtaattcctgattatgattgaaatagtcaccgatagcagggaaaatacctttagatacattatcaatcccgatggcagggaaatagaattgaggccccgcgacaggaacgaatatataaatcagataatagataaagaaggaagtgacgagaacaaaagacatcttttcgaaccactcaaacttataaatgaaataaaacaatgccacaatcagcatcatcggataataaaagaaatatcccatattaaatgcttcactgacgataaggtgcggaaacgtatggcaaaaccagatagcaggctgaccattgaaaataaactcctcggcagttgcaaatacatggtctaaattcggaaagaaacgattgaactcgaaagtatccggataccagtaagacaatagactcatctggataacaatgcgcacaaacgctgaaaacttacagggggcaagacgataaagatacatcaacaaaaaggtcatcgccgcgatcatagccctatccagcaacatgtgccatggatgatccattcgctgaaacaggaatagaatcaatatggaagtcaacagattataaatcagtgtaatcttttccacagcaaacaaccctttccgggtttctacgcgcttaaataagtctaaagccatccttcatttttataccaggcaatggtttcacgaactcccttttccaaatcatattcgggtacatacccaagttctttcattaccggggatatgtcgcattgccagttgcgttgtttcattatcttatatttatccgaattcagggtactgctcctcccggaacgtgtagcaatgaattcagcgaacaaagatataacttttagcacaattaatggacatttcaagtgaagaacaaacggattgcccaattctttttgtatcagatccgaaaaggcacgacttttatagattttcccatctgtcaggaaatacgccttttgaaccacttttttctccattcccagaaaaatcgcctgcacaatgtccttcacataaacaaaagtcaagtcctggcgtcgaaaaccgaccgaaaagtctacatgcttctgaatggacttggccatcaggaaatagtctgactcacggggaccatagactcccgtaggacgataaatgacataaggaaaaccgggaatactctgaatatataattccgctttcaatttactcaatccataagccgtattaggcatcggagtatcttctccgcttatcggagtataatccttctcacgtacaggtccgaatacactcaacgtgctaatatatataaactgcttcggaaccatattcaattccttcagcgtgtctataaaatatttagtctgaagataattcacataatcaaaggtctttttatcagaacactttgtcacaccggcgcaatggatgatataatcaaatttgctgtaagtacctttatgcccggagagttgggcgcgaagctcattgggatgtgcaaagtccagttccagaaagtgaattttccggttctttaaataccgcttgctactcgtggggcgaattccggcccacacaccaaactttcgtttcaacgcttcttccacgatgaaacttcctataaaaccacttgcacctgtaattaaaacactctccattattacttccctggttctacatgaatattgattcaaaaaatatgatgccacaaagatacgataaatataaaataaaagccattttgcttttctcaattattatttgtttatttgcaatgcgatttatttactattcaacacttttaaagcacgtggaagataaggccgattttgattttctttttaaagagtactatcctcaactttattattacgcatttcatttgattaataatatggaggctagtaaggatattgtcagcgacgccttcgaatttatttgggccaattatgctaaaatagataaagccacagctaaatcttatctatatgtctacgttcgcaacaaaagcattgatttcctgcggcatcagaatacacacgaacaatacgtacaaatctattccgaactgaccaaaagttatgttgagacggagtatcaggagcaggatgaaagaatgatgcatatcagtaaggcgatggaaaaactgactccacataccaggcatattttagaagaatgttatattcaacgcaaaaaatatcaggaagtggcagaggaattaaatattagtgtcagtgcagtcaggaagcatattgtgaaagcattacaggtgatacgtgaagaatgtgcaaaaaaatcataaagcaggtgtctttattttatgattaaacgtaatataaataagtatgatacagtcgaacagtgatgaataaagatattgacaatatagatagtacagataaatctgtagagaaggcactcgacattatggagagctcttcagaaataaacgtcgaacaactgcaggaaatgcttaaagatgaagaaaccctgcaggcttgtcgcgacatcatggatagcagcctcttcctacaacaaaaaagtggaatggaactacccaatatagagatggagctagaacgattcaagaaaaaacaatacacggcaagaatgcgttccaacttctggaaagtaagtatgggaatagccgccatgattgccgttctatttggaacttactatcttatcaataccctgacgacccctgccctggagccaatcacagtatttactgcggatgctgcccctcaacatatcactctgcaaaaagataacggagaaaagattgtattagacgaaccgcaatcaaacaatcaaaccttaccacagaaaatgatctcaaagtccgaaaagaaagaattggattacaggcaagtcatttcaacgaccactcaaacacatgtactcactgttccacgcggtgaaagtttcaaggtagtgttatgtgacggcacggaggtctggctcaatgccaatagtaactttgtctatccaacggcctttattggcgacgaacgtatcgtcactttagaaggtgaggcttattttaaagtggccaaagatccggagcgacctttcatcgtaaaaaccaaaactgtgcaaacccgcgttctcggtactgaatttaatatacgcagctatactcctgaagatactcatgtagtgcttattaatggaaaagtagaagtcagcaataccaaaggaggatcatataccagactatatccgggagaagatgcacatctgcaatctgatggcaactttatcctggcagaagtagatctagactcctatgtttattggaaagacggctatttctactttgacaatgtcacattgaaagatattatgcaaaatttgggacgttggtacaatgtaaacatagagttcagaaacaaagaagcgatggagtataaaatgcactttatatccgatcgtaccaaagacctggaacatacgatctcattacttaatagaatgaaaaaagtgacagtcaccttgcaaggcaatacgcttactgtagactagatttttattgcataagtataactaatctatgcaaaatacaacaaaatatcacttttattaaaaaataaatcgcaaaaggggtatcctttttttcttctcatacgcactagttatataaacatgttcaaaatagtgttattaaagacaaacgtatgagaaataattggaacctacttattgtgtgttttctatgcgtattatgtttccggccctaccaagtaaatgctcaggtgcaatcgcaaaagaaaatcacgattgaaattagcaacgaacggttgccgtccgtactaaaacgtttagaaaaactatccggatataagatcctgtttacgtatgacgatgtcaagaaattcaccgtttctggctccgtcaaggataagagtatagagcagactctcgatataatcttagccaataagccactggaatatcatattgaagaccaatttatcacaattactatcaaaggtccttccaaacaggcgaaagtattcaatgtgaaaggagtggttatttccggtgatgacggacagccgctcattggtgcaaccgttgtcatcaaaggaagtaagtccggtgtattaacagatatagatggaaaattctcgatagaaaatgtatccaataaatccctgttacaattttcctatataggaatgaaaccgcaagacctgactcctgctccaaatatgaatgttacattaatgcctgatgtacaaacattatctgaagtagtagtaacaggtatgcagaaaatggacaaacgtctgtttacaggagcaactaaacaattgtccgcagatgaggtcaaactagatggtttgcctgatatcagccggggacttgaaggacgtgccgcaggcgtatctgtacaaaatgtttccggtacatttggtactgccccaaaaatccgggtacgtggcgctacatctattttcggtagttcaaagccactatgggtggtagatggagtcatcatggaagatgctatcgacgtaggtccggatgacttatcctcaggagatgccgaaacattgattagttcagctattgccggattgaattcagatgatattgaaagctttcaaatattgaaagacggatcagcaacctctatctacggtgcgcgagccatggcaggggttattgtagtaaccaccaaaaagggaaaagccggtgtcagcaaaatcagctataccggtgaatttacaactcgtatgattcccagttataaagaattcaatatcatgaattcacaggaacaaatgggaatctataaagaaatggaacaaaaaggatggctcaacaatagcgatacttaccgtgcaaaagatagcggagtgtatggacgtatgtatcagttaatcaatcaatacaatccggttacaggacaattcggacttgccaacactccggaagcacgtaacgcttacttgcgtgaagcggaaatgagaaataccgactggtttgatactttattttccaacaatatcacacaaaatcattctgtcagtatcacttccggaacagaaaaatcttcattctatgcttcattaagtgccatgtcagacccggggtggtacaagcaaagtgaagtaaaacgttatacagctaatttaaatacaacatataatatatataagaatttatctataaatttaatatccagtgcttcctaccgtaagcagaaagcgcccggaacactaagttctgaagtgaatgcagctagtggagaagtcacccgtcaatttgacatcaatccatattcgtatgcactaaacacatcacgcgcattggatccggcagtcaactatacagctaactacgcaccattcaatatcctccatgaattggataacaattatatggacttaaacgtagttgacgttaaattccaaggagaagtaaaatggaaagcacttccagaattagagcttagcgcattaggagcagtcagatatcaagcttcttcgcaagaacataatattaaagaccactcgaatcaggcaacagcatatcgcacaggaatggatgacgccactattcgtgacaacaataatttactctacaccaaccccgacaatccttatgctttacccatcagcatactgccggaaggcggtatttaccagcgtaaggactatcgcatgctgggagtagactttcgtgccacagcatcctggaatcatttatttgcagaaaagcatataaccaatcttttcgctggtatggaggtgaatgatttaaaacgcatgcagaattattttcaaggatggggaatgcaatatacaatgggcgaaattccatcgtacgtatatgaatttttcaagaaaggtattgagtccggtgaaaattattatggattaaaccataccacaacaaggagtgtagcaggttttgccaatgcaacctattcgtatgatggccgttatacagtaaacggaacattccgctatgaaggcaccaaccgcatgggaaaaagccgttcttcccgctggttacctacatggaatatttcaggagcatggaatgtacatgaagaaaatttcttcgaaacactcagctccgtgctgtcacatttgacattcaaagcatcctactctttaacagccgacagaggtccggaatatgtaacaaattcacatgccataatcaccagctattcaccattccgccctttcaccagcggacaggaaaccggactttatgtatccgaccccgaaaatagcgaattgacttacgaaaagaagcatgaattaaacatcggtgctgatatgggattcttagacaaccggatcaatttctcaatcgactggtataaacgcaacaactatgacctgattggtataactccgacacaaggagtaggtggttctatttataaatatgccaatatagcctccatgaagtcacatggtattgaattcaccatctcaagcaagaatatccaatcgaaagacttctcatggaatacagatttcatcttttccaaagcaaaaaatgaagtgaccgagcttaacgcccgttccagcgtgatggatctggtttcaggctatggttttgcgcgtcagggctacccggtgcgtggtttgttctctatcccatttgtcggcctaagttcaaatggtatcccaatgtataatatcaatggaaaaataaccaatactgatattgatttccaaacacgtgacaatatagactatctaaaatatgaaggtcccactgatcctactataacaggtagctttggtaatatcttcacctataaagcattcaagctaaatgtatttatcacctattcatttggtaatgtagtacgtttaaatccgtgcttcaattatcaatacagtgacttatcctctatgccccgtgaattcaaaaatcgctggacagttccgggtgatgagaaacataccaatatccctgccatcatttccaaacgtcaatatgaagataataaagatttgatgtatgcatataatgcctataattactctacagaacgaattgccaaaggagactttattcgtatgaaagaaatttccttgtcctatgattttccaaaatcatggattacatcagcaaagatatccaatttatctttgaaacttcaggctaccaatttattcctaatctacgcagataagaagctaaacggacaggacccggaattcttcaataccggtggagttgcctcccctgtaccccgtcagttcacattaactcttagattaggattttaaccattcagataattataaaaatgatgaaatataaaaacgtattatatacagcagtcatttcaaccttatgcctgggaataacctcctgtagcgattttttggatgaaatgccggacaaccgaactgaactaactaccgaagagagcattaccaaagtattggtatctgcatacccaatgaccaccaactgtcatataggcgaattctacagtgacaacattgatgaaaatagtaaagcatacagctatcttttccggttaaacgagcacttgtatcgctggcagcaaaccactgaagagaatcaagactcacctcatgccttatggaatgattgttataactcgattgcatcggccaaccaagccctggcagccatcgagcaaatgggaaaccctcaatcattgtcagcacaaagaggtgaagctctaatatgtcgcgcatataatcatttcgtactagctaccacattctgcaaagcgtatggtacaaatgcagataaagacctaggtataccttacataaaggaaccggaaacatctgtaaatccacaatactcacgcggaactgttgctgaagtctatcaaaatatcgcagccgatttagaagaaggattgcctctaatcgacgacaatatttactcacgagtgaaatatcattttaataaaaaggctgcctatgcatttgctgcccgcttttatctatattacacacagccggatttttctaactgccagaaggttatcaattatgccaatatagtactcggcacgaatgcttcccaatatttacgtgactgggctgcattaggagctttatctcccaacaagaacatacagccgaacgcttatgtagatgcagataatcgggcaaatctactggtaatatcagcagcttcatattggccattggtttccgatccgggttatgccaactgtgaaagatactgcatgaataatattactgcctcggaaagttgtaaatccgaaggtccatggggagaccagtcaagctaccaccaaatcccatttgcgcctggtggctctatcaagaacggattccgccgtttagtcatctatcagcagttcacatcgggcaacagctgggtcggttatatgctgtatcctgctttcactaccgatgaagcattactttgccgggctgaagcttacacattactaaaacgttacgacgaagctgcagccgatatagacgcctggcagaaagcctttacgaaaaatacacaaaccttgtccaaagagacaatcaatgatttttatgctcaattaaaatattacacaccggaagccccgacagtaaaaaaggaattgcatccggattttataatagaaaaaggaatgcaagagaatctgatacactgtattctacatgcgagacgcctgttaactttagaagagggacttagatggcaagatataaagcgctatggcattgtaatctaccgccgctattatgaaggttataccttggtgaatatcaccgacaagatggacacgaatgaccccagacgtgcaattcagctaccggccagtgtcattacggcaggtatgcaaccaaatccaagaaatgactaactaacttaaggagggaaaaatatgaagaaatacatcatatatagtttaatcataacattaacctgcggactgggagcttgcaacaacgacgagggcgtggacaaagcaaacagcatcttctctacagaagaagtagaacgcagcccattcgacaactggatattgggtaattacacccatccgtacaacattgcattgaaatatcgcatggaagataacgagagcgatatgacacatgtattagctcctgccgactataaaaaatccgtagtactggctaaaattatcaaacatgtatggctggaagcatacgatgaagcgaccggtaatccggacttcttacgtcaatacatccccaagaccattcactttatcggctctcctgcctatgaagacaatggcaccatggtattgggaacggcagaaggtggtatgaaaattacattatacaatgtaaatgacatcaatcctgataaaatagatatcaatctgctaaacgaatactatttccagacaatgcatcatgagttcgcccacatcctgcatcaaaccaaaaactatgatccggcatttgatcgtatcacagaaaatgcctatatcggcagcgactggtatatggtgggagctaaccgcaatgcatggcaacaaggatttgtcacttcctacgcaatgagtgaatcacgtgaagattttgtggaaaacatcgcagtgtatgtcacaaataccaaagactactggaataacatgctgcagaatgccggtgaaaacggccgtgcactcataaagcaaaaattcgaaatagtctatagttacatggaacaaacctggggaatcaatctggacgaattacgcgacatcgttctacgccgccaagatgatatagcaaacggcaatgtagacttaagtattattgaataaactatgaaaattatgaagaaatatctatcaatatacacacttctggcattgatttgcattgtattacaatcttgtcttttctctgaagaagaaatattcgacgaatcatccgccaacagagctacagccgatgtaataaaatgtcaggagattcttaaagatgttccgaacggatggaaactggaatattacataggaagcaactattctgcaggtgcagtcaccctactaatgaaatttgatggaaaacaggtagaaatggcgtcggaagcaggagcagaaggttacaagccgggtaccataataacctccctgtatcaagttaaatcggaacaaagcactatgctcactttcgactcatacaaccagctgatccacatgttttcaggtcctttaggcctgaacatgaacgtgggaggagattatgagtttattatcatgagcgcaactcccgacaaggttattctacaaggaaaaaaatataaaaatataatggaaatgacgcctatgcccaaagatataccatggcgtatccagcttgaggatatcattaacatcgagaaagatgcttttctgaatacatatcgcatggagaaagggggccaagtactgaactactttatacgtgacaatggcacaatgtctacattctccgtttacagtaccgattatagcagtgcagaaagtttaccatatatttatacagaaaaagggctgaagttacagtctccatataatgtcaacggagttgaagtccagcacttcaaatgggataaaaagttcaggctatttgtttgtaccgatgcagatgcaacggatattgtattaaaagagtattatcccgaaaactatctgcaatatgaagactatatcggtacctacactgcaacggttgacgattacgatgaaggtccaacttcacaatctgtaaccatcactcctaaagtcagaggagaaagttatactctgaaaagtattggcggattcaacttcactcttctgtatgacaaagccagcggaaaactgatcttagattcacaaagtataagtccggtttcttcatcgtcttactactttgcgtgtgcggcaggtgtagaaggatatgctcacacagaattaagtttgccttcacgcttacgcagcggattagtaaatgttacggtgaaaatcaatcctttcactttctacttcgcggataaagcaagccaagaaaatacgtcattgataatctgggcttattcatccgatgaatattcaacttcaggactaatgggttactggagttggtataactcaatcttaatggaaaaagaaaacgaaggtaattaatacaattatgagaaagctttttaatatattcttatttgtactttgcaccatagcaatagcgggatgcaatgatacggaaagcagcgaatccaggttagagatcaaagctgtaaatactaatttccaagcgactggaggaaaaggctacatacaacttcaggcaacaggcaatataacagcagatgttaatgccgactggtgtgtgctgaaagaagtaaaccccaatgaagtagtattcgaagtaaaagaaaacaccggatactctggtagaaatgctttattgacaatcagtaacggagtagaaaaaaaggcgttcaatatcaatcaatccggagctgttttcatcttcggtaaagacgagtggatgctccgcaccgacaataaagcagctacgctacctataaaattacaaagttctttcgattatacaatagacatacccgcagaagctcaagaatggttgtcatttgaacagaatgcgaagggaataaatttcaaggtaaaagaaaatacctccggaaaaatgagaggagctattgtcaatgtggcagcaaaagacagatcggcttcttatcaggtaatacaatatgatgttgacgaacttaccggaacatggcaaggcatgttttcagacgggcaaatgaattacggcttgaaagatgtcatcattgaaaaacaggaagacggaacatacctgctttcaaacattctaaccggattgccttacaaactgaaagcaaaagccatagacaattgcctggcttttggggccggtcaaaacctaggagtcttcgaggacaatttatatctctcattcgaaattcttagctctgacctatattatgtaaaagatccttctgtaacaatctcattaggccccgtaatgttaacagacggaacattcgttttcgctttttccggaataaaagagagtgatcctttcggttttgttttccgggtatatgaagatgcaaaactacagaaggttatagacaatctgtccatttttattaattgtattctatttaaagaagacataatccaataacatatgaaaaagatactattaactagctttatcgtggcattaggattacttggtgcaagctgtaaagatgacaacagcaccgcaggcggaggaggagaaatacttccagaccaacaggtaagctgtgagatatttatgccgactaacggagaaaccgttataatatcagacaaactgattatcagaggagaaggaacgactaactatggtaaaattatctccgctgaacttaaagtaggaggagaagttattaccgacataagttcggttccattctattatgaatatactttccccaaggaagctgaaccaggagagttgaaaattgaattagcagtcaaaggagatcatgaaggcagtgctttggcaactattactgtcacaacagaactcggtgacaggcctgcaccacctcaatatggagaagacctcacagatacacgtgatggaaatgtatacaagacgatacaacttgcagaacaaatctggatggcagagaatttacgttatttaccggaacagaattttgatatatcttcaacagcgcccaaatattatgttatgttcgacagtgatatcaaaacagacttgggaaaagcttatttaaaagcttatggagcctactataacttacctgcagcacttcaaggtgaaacagcattaggagaagatgaaacacggaatataaaaggtgtttgtcctgacggatggcatattccttcacaaaaagaatggcagacattatctaaatatgttttagactccggcatggccgctatcatgaatgatggtcaggtagacgaaacagcaatagcaaaagctttagcttcaacaacaatgtggatgctgccggaatatacagaaatagaacctcaaccaacttgggttggcgtagaaatggaaaagaataatgcaaccttattcaacggtctacccatcggattccgtgcatgtgcaggtgacgaagactggatgcattcctgctacagtgccggctggtggagttcgacagctggagtacaaatgggacctgaattcggtatcaccgtacgtttatggtcagacctccacacatttgtaaccaatgcagaattcaatccgggagtaggtcttcctgtccgttgcatcaaagattaacgattatattattactcactaaatataaatacatttatgaaaaaatttggattctttttattcgcagtcttaggactaattgcttgtggtgacgacaacaatgatcccgctccagaacaacatgtaacatgtgccatatcttctcctaccgaaggggcaatgatagacatagctgaaaagatgacaatcaaaggagaagcaactgttgacattggtcaaatatcgaatgttactcttaaaatcggagacaaacaaatttcagaagtaacttctgttccatttagttatgaatacacattcgaagccagtcaagccgtaggagcactaaaaattgaactgaccgtcaaaggcaatcaaggtgccatggcgacaagtgaagtaaatgtcacactaaaaaagaccgaaccaaccccagaaccggaagaaggaaagatgattgacccacgggataatcatgaatacaaaattgttacaattggtgaacaaatatggatggcagagaacttggcttatttaccatcagttagcaaaccggaagatgccgctaccagtgatggagatccgctctattttgttttcaactatgatggcaaagatgtaaatgcagctaaagctacgaaagaatacaagacatacggagtcttgtataattggtatgccgctatgaaccaaaagaacgcaaccggtggaaatgcggatgccataccaagtggcattcaaggaatctgtcctaacggatggcatctacccagcaaagcagagtggaaaaaactagaaagttttgttgcagatgaattagcaccagttgaaggtaatgtatggacagatgatgaaggaaataaatactccgataaagactgtaaaaacgtctggtcagcattgacaggaaaactggatgctgacggttggggagaatccggcatgatagatgaaaatcctgatctcgctaaaggtccacgtgacacctatggctttaatgttatacctgccggacaatgttatcagagcggaagttttgaaacgcctaagtcacagagtagaacagacttttggagcacagaccaagctacttatggagcaggaactgtatatttcagtaatatgagttatgggttaggttattcttctgataaaggaggaatacaagtaaaacgtggcctttcagtacgttgcgtaaaagattaactatattgtagataaacatttatcaattagttcattacagaattaataaattctctcttaaagataagggaagtatgtcgggagatatgcctcccttttaatatatctttttacacctagttatcaactcactcaaacatataattagtcgatatccaatatcacgaaataaaacaaattctgaatgttcttccattttattatatatctttgtaactagatattttaaaagactacattatggcaaaaaagaaagaaaagaaagagaaaaaggccggcaagagaatgagtaagaaagagctggcagcgttattaatagactttttccatgccaaatccagcgagaccttaagtatgaaatatattttttcagaactgcgtctcactacccatccgcaaaaaatgttatgcgtcgatatattacatgaccttttagctgacgattatatttctgaaatagaaaaaggaaaattccgtctcaccaatcatggaacagagatggtaggcactttccaacggaaaagcaatggcaagaattcctttattcctgaaggaggaggcgagccgatatttgtagccgaacgcaattcggcacatgccatgaacaatgacaaagtaaagatcaccttctatgccaaacggaaaaacagagaggcagaaggagaagtgatagaaatactggagcgtgcaaacgatactttcgtcggcacactggaagtagctaagtcatacgcatttctggtgacagagaatcgtacattagccaatgatatcttcatcccgaaagataagctgaaaggcggaaagaccggagataaagccattgtgaaagtaaccgaatggccggacaaagcaaagaatcctatcggacaagtaatagatatattaggtcaggctggcgacaataccacagagatgcacgcaattcttgcggagttcggtctgccgtatgtatatccgaaagcagtagagacagcagcggataagattcctgccgaaatttcagcagaagagattgccaaacgcgaagattttcgtaaagtaacaactttcaccatcgacccgaaagacgccaaagattttgacgacgcactttccatccgcaagctaaaggacggattgtgggaagtaggtgtacacattgccgacgtgacacattacgtaaaagaaggcagcatcatcgacaaggaagcagaaaagcgggcaacttccgtttatctggtagaccgtaccatcccgatgcttcccgaacggctgtgtaacttcatttgttcactccgcccgaacgaagaaaaactagctttctccgttatcttcgatattacggaaaaaggagaagtcagagactcacgtatcgtacatacggttatcaactccgaccgtcgcttcacctacgaggaggcacaacaaatcatagaaacaaaagaaggagacttcaaagaagaagtactcacattagatacgattgccaaagcactgcgcgaaaaacgcttctctgcaggagccatcaacttcgaccgctacgaagtgaagttcgaaattgacgaaaaaggaaaaccaatcagcgtttacttcaaagagtcaaaagatgccaataaactggtggaagaattcatgttgctcgctaacaagaccgtagcagaaaagataggatgtgtgccgaagaacaagaaagccaaagtgcttccttaccgtatccacgacctgcccgatccggagaagttggagaacttgtcacagttcatcgcccgcttcggctacaaagtgcgtacaagcggaacgaagactgatatttcaaaatccatcaaccatttattggacgacatacacggaaagaaagaagagaacctgatagaaaccgtatccatccgcgccatgcagaaagcacgttactcaacccataacatcggtcactacggactagctttcgaatattacactcactttacttctcccatccgccgtttcccggacatgatggtacaccgtttggtgacgaagtatatggacggaggacgtagcgtatccgaagccaagtacgaagacctctgcgaccacagctcgaacatggaacaaattgcagccaatgccgagcgtgcttccatcaaatataaacaggtggaatttatgagcgaacgtctggggcagatttacgacggtgtaatctccggcgtaaccgagtggggactttatgtagaactgaacgaaaacaaatgtgaaggtctggtccctgttcgtgatctggatgatgactactacgaattcgacgagaagaactattgtcttcgtggacgccgcaaaaacaaaatatacagtttgggagacgctattactgttcgggtagctcgtgccaatctggaaaagaaacaattggattttgaattaatagaaaagtaatattcaccacagaggacacggagtacgcagaggaaaattaatttgaagactctgtgtcctctgcgtcctctgtggtaaaaccatgaaaactacaacatcaccatgaaaacccttattatcgaagacaaacaacaaatcgagtctattatcctccattgcgatgcctgttttgtaggcattactgatttggaaggtaatccctacgtagttccgatgaacttcggttatgagaatggcatcatatatcttcattcgggtcctgaaggcagcaagttggagatgctggaacataataataatgtatgcatcactttcagcgttggacataaacttgtctaccaacacgaaaaggtagcctgcagttacagtatgcgttcggaaagcgcgatgtgtcgggggcaagtagaattcatcgaagagataaacgaaaaacgccgtgcattggatattatcatgcgtcattacacggatagtgagttcaactattccgatcctgccgtgcgcaatgtaaaagtatggaaagtagctgtcagacagacgacaggaaaagtcttcggtttgcgagccaacgaaaagccataaaccggtttccggctttctgcctattcgctttcttcctcctgttgcctgctttttctattttcgcacaatcagaaaagcaggtaaacagtaaatgtaacaaactacagcctcttcggagaagatatcattgtagacggagccagacgcatgatttacctggtcaagctcaaatcaatccaaaagtgatacattgtaaaaactccttcatgatttacataagtatgtacagatgtatattcattcgtattatctgttaaaatcaatggggaatcctgtggaaattctttcgttatcttattattaacaatctgaagccactccttgacagacttattttcaatatatgcaagcattccgttgtttcgcaaattcttattgccatgtatccctagtttatagcgttcaatgccacctgaaggattgttcgttgaacttttaccaaccacatattcttcttcactttccgttttatacttcggcaatcttttagcctctgcaaagaatatacgtgtataactgtcgtcattcagatagaaatagatatcttccttccctctgccgtcttcgcgttcgtgttccttctgagccccaatcaaagtttcacacatagtaacgccaatcatattgaacgtgtctactaatgattgagtattcaacacttcacgcttattcctgcacaacttattccgtttctggatacccagccggatgatataaagaatctcttgtatatatttatttgaataatctatatggtcaaaatgcatagcttttaatatccgtttttaaacatgtcgcttttaacattttccgcatcccggtaagcaatggtacgcatccaatatttaagtttattcggtttgataaaatttatttgattgtctattttatagtatgtgataattctatttattgttaatgcattattggaaatattatcatacaagatttccgacaatatagtttcattacgtcctgtaacatcattttctacagtcacagcagactggtttgtatgttcaaaagtaacccaaacataatcgtcagtaataatttgacgaacagatttaaatccgtatccctcttttccgtatgtacgattaagaatatcacaaaacacatcacagtatttgtccaatagtccggcatcaattcctttaaatataaccggatcggaattattcagattattagccaaaagcatagtgtcttctattatcatgcaatccaaacgatccatccgtccaaaggaaacaggataacctttttcatccgtatttatcggtaaccttaagatatcctgcgcatcaacggtatatgcatcactctgttgcacaaatgctttcgccgacataacctttattaaaaaagcatataaccatctgttttccttaaatacagacacaaatttcttcattaattcttcactttcatctttcaaacctaatattccttttggaaatagtatattctgctcattataaataataggcagattaagatttaagttcaaacgcagtagaacatttggaggggtacttatatattcgggaatcctcacccaatctttttttgatatgattttagtcatcccatctgtataaatatcacagttaaagagtttagaatccatcactctcctcccattcaagtcaacaactcttttgccttcttcccttaattttatatcatcaatagtcgatttatccctttgataaccgcccccgtttccttttcccttaaaaatttgtgctattttaggatattgaatctcatatttctccatcagttgttttaaatatcctccaccgagcaagtttgttttccaagtataatctttggaaaatgccacatcaacaggaacgcgatacctatcatattgatcaatctgaaaacgaatagctcctttctcgttggcggatgagttacggatgacaatatgctcgatgacagagttacggacgaaacatccattagatatcttaacagcaatggttgctatatttatgttcccccataaacggtccattaaaggagtaaaatcatatattttttcaatattccaataatggatcagactttttctatatcggatagaagaaggcatatataagaaagtggatgagggcatgatcataaataccacgccttcattctcaagtaaaagattattcaaacaccgatataaaaatatcagagccggattcttgttgggaaatgggcatagctttccaacgtagtcattatatttttctgaaaagaattcatcatctattccagcctctatgttctttaattgctcttttttcgaaatattaaaagggggattccctgctataatatcaaatcgcaaagacgttcttttataccatttgaagaaaccttgattaacaagattaccatgctccactaaattatcaaaagtcagtttctcccaaatttcttttggacggatatggctcgacagttctatttgcaaagaagtagcagttatagacagtgcatctttgtttatatcaacgccataaatacatttggacaatattttttttatttcctttatatcttcctccccttctataatctgcttattattgttcagcatccataaggttattaatcttttgtatgccaaaaccaaaaaaatacccgagccacacgaaggatccagaattttgaaattctcgaaatcaatttctttattaaaaggaagtaattcatcaattagcaatcgtgccaaatgaggaggagtataaaacgctccggtactcttctgctttccgtcaacagatgtgacaaaacgttcgtataaccgactaataaactcaataggtaataaattgaagtcatagtagcgccaaatagatatctgtccatcaaaatccttgtttccatcaagagcatcggctataatatgaaaatcgattgccttaatttccatttcctcctttggagatattttgaatattcctccattgaacttgacattaagagctgatagaagcccaacaatatcattccccctaagcacatcacagaatgtatattctttatcaaaaagagtagtattgctttctttgtcaactatgaattttttgaagaatccggaatcaaaaacactgttaccattatgatctacctgttcttccagatattttatcaggatgaatttaacaagaagtttcttcagaagctccaactcacaaccgatctgcttatttttgtttaatacatatttctctatatgatctaaaagtttctgataaggagatacactaatatagtctgcaggagattcctctaatatacgaccttcaaaaattcgttttttgaggcatgagtcgatttcccgaattactgatattccgtccaagaaagaaggttccggtttctttttgacgctttttattggatttcttgtatctaatattttgaaaccatcttcatatataataactgctaatgcgatttcccctagagtccacaattgcttgtttatctctaccaaattaatagtatctttattattgcactcgtgcctatcgtatatatagatatatggaacaggtcgattttctatcaaattattgaaacaataaaaataatcagcattgactctatttgcttgcattctgtagtattccagcagcttgtccgcataagaatctttgactgaatacagattatgtttatatccagccaagtctaatgcttgcaatactgattctttccttgtactcatactcaaaaataacacagatctttttcgttggcaaagataacttttttttcgagaacctgtttgtcatctgaatgattttgatatgatgaattacccaatcatcgcatttttgactaacaaccatcggaaattagtctataaatcaccgtcgctctcgcccaaataggaattaagtttagactcaaaatcgtactgttagtatctgtcgaaggtatcgttgcgactcccaagcattttgccgtgtatagtattccggttggtggacgtgacggagatacaataaataaatccaggataatcgctaaaagcaatgtgaggcagcctcttactatttaagctacctcacattcttttttatttctctttcatcaattaggatagagctataagttatacttaataaaacaaataaaaccggcatctttataagttatgcttaataaaattgctatatttgttttacatatcaactataacttataaaaagatgaaacttatcaataggcctatttatacagagcgtattcgtccgttcataggaaagggaatcattaaagtacttacagggcaacgaagagtagggaaaagctgtatccttatgcagttaatggaagatataaaaagagacgattcagaagccaatattatctatatcaacatggagcatgaagaatttcgaatgattcatgacgactccgatttgtttcagtatcttaaaggaacaatgcccccggataaaaacaattatttgtttattgacgaaatacaggatatccagggattcgaaaatgttctccgcagtctacaatctaaagatagttgcgatatcttcataacaggaagtaatgccaagatgttatccggagaattagcaacctatttatctggacgctacatcgaattccatattcatagtctcggttataccgaatttcttgaatttcaccaactggatgacaataatcaaagcctgatgctttatctaacatacgggggacttccttacctttcccgactccaactgactgatgaattagcatttgagtatttaaggaatatatatgccactatcctattaaaagacgtagtgaagagagaaggtatacgcaatgtcgattttcttgagacattagctcactacaccgcagataatattggcagcctcttttccgccaataatattagtaaatatttgaaatcccaacgtatcgatatatctacaacccaagttattaactacctgaaagcactttgcaacgcctatttaataaacaaaataggacgtattgatattaaagggctaaagaaattcgaggtcggagataaatatttctttgaagatttgggactaagaaactgtcatatagggttcaatctccaacgggatatacacaaattactagagaatgctgtgtatctacatcttagtttactgcaatatgagatttatatcggacagaacgaacaacaagaaatagatttcattgggataaagcagggaaaaaaggtatatgtacaggttacttatttagtcatcgacgagaaaacccgggaacgcgaatttggcaatttaatgaacattcaggataattaccctaaatatgtcgtcagtcttgatgagttcaataaaggaagtaatgtggaaggtattcatcatttgcatcttgcggattttctaaaaatgaagcaattataagatcctactgtcaataggaggaagaaagcgacttctactttcgactggattaattggctatcagatctaacaatgttgtaataaaagcacttggtattccagaacttcagactatttatatactgtagggacaatgtcagttgcccctacagtaaactaataatccaacaagctttttacactctctctaaaaactaagaacaaataaaaaagacacagttattttatacatacctattacaaactgaatttctttgtttgtacatcgcggctatttccaccaaccatcacttcaaattctcccggttcacatacccaattcagcgcactgttatagaatttcagttgttctgctgtgatatcgaaagagacagtgcggctttcccctttcttcaaatggatacgttcgaagcctttcaattctttcaccggacgtgctacactccctaccatatcacggatatacatttgtacgatttcgtcagcatcatagttgcccgtattggtgacagtgacagaggcggttatcttccccttttcattcattgagttattgctaagttgaagatcaccgtaacggaatgtggtgtatgacaatccatatccaaatggataaagaggatcattgtctatatcaagatagttgctacggaatttactgaaccactttcctgcctctaaaggacgacctgtattcaaatggttgtaatacaaaggaatttgtcctacgttcttcgggaaggtcgtagtcagttttccactcggagaaacatctccgaatactacatcacaaatcgcgtcggctgcttcactgcctccgaaccatacattcagtatagccgggaaattttcctgttcccaagtcatcacagtgctgcgacctgcaaaatagaccagtacaatcggtttgcctgtctttttcaatgctgtcagaagatcacgctgcgcatccggcatttcaagattagtacggctgctggattcaccactcatttcagacgattcaccaactgccgccacaatcacatctgcttgggaagcgacattcaaagcctcatcaagcaactcctgcgcactacgcgaatcacgcatttcacgaccgaacattgtagcttccgcctctctttgagcatcatacatcagatttgaacctttggcataaagcacttccgctttacctgccaatgattgcttcatgctttcatacagggaattgtatttgtcagaagcagctgccacactccatgtacccggcatattggcctttgtattggctagcgggccaacaagagctattttgcctttacgctgtaatggaagcaggttgttttcattcttcaaaagcacaaatgtttcagtagctattttacgggctacggcacggttttctgccgtaaagatgtctttcttcacacggcttgcatcacaatatttataaggatcatcaaacaatccgagcttgtatttcgcttcaagaatacgacggcaggctttgtctatttcagccattgtcactttcccttctttgagagatttctccaaagtagtaaggaaaccgtctgcaaccatatccatatcggttccggcactaagtgacatggcagatacctgttgaagatctcccattccgtgagcaatcatctcggaaatagctgtgtagtctgtcacaacaaaaccatcaaatccccaacggtcacgcaagacatcggtcatcagccatttgttgccggtagcaggaataccgtcaaccacattgaaagaagtcatcacactacccacaccagcatcaatagctgctttataaggagggaaataattgttgaacatacttaggtgactcatgtctactgtgttataatcacggccggcttcgggtgcaccatacagggcaaagtgtttcacacaagccataatggtgttcttatctgtcagatcatcaccttgataaccttttaccatggctgccgaaatctccgaacctaaataaggatcttcgcctccgccttcagccatacgtccccagcggggatcgcgacaaatatcgaccataggactgaaagtccagcaaataccatcggcactggattcttttgccgctatacgggcggattctttgatagcctccatatcccaactacaggaaagtgccaaaggaataggaaaaacagtctcatatccgtggatgacatccataccaaacaacaaaggaattttcaaacggctctgctctacggcaatcttttggacttcccgaatattctccactccttttacattgaaaagaccaccgacctgacctttccttatcttcccggccacatcactgctcttagcttgtccggtgacaatctcacccgacacaggaagattgagctgaccgatcttttcctgcaaagtcatcttccccatcaggttgtcaataaactgatccattttacctttatcggcttgcggtgtagccatagcagtgacagcagacgccgtaatcactgcagttagcaaaaatctacctattctcatattctgttttgtatttatattattctttcttctgtttttattcggctgttgtagaagtgaaacctagctttttcagtccgtcctgaatttccggacaactcataaataaccgccaaagtagtcctgtacggtggttctctatcattggcgcaatcgtacactggtcgatggcgagataatgcggaacagtccacttttcgttcggtgagaatgcatcgtaaaatccatatttcccccaaatccacgatccttgtttatagaaacctttcaaggcggccatcgactcttccggtgtgtaagggaaagaggataaagcggcagtaggagttatcacaccgagatcattgtcgggcatgtgggctgaatagccatttatggagtaactcgctgtaagtccccagcaatcaggcccatatcctttgtagcctttcggattagtgacacaatattgataatcactcatcgcatgattgcgtaccacattccagtagttggcatattgatcggtcaagttacgcgggtcgaggccgatgtaagagtagtgtgcccagaataagggaccgcctttctcttctgcgccattatgcttcagttcgagcgggtaaccgtaaggtttggaagcgcttttgatgccaccgctacgcgcccacccttcatggtaacaggctgccggaacggaatgtgtaggggatgaggctgcaaggatataggtaatcagacattcattatagccttcgagcgggaagttcatttcccagccatagttaggagaccaatgccagtataatacattctggtcgccgttgcgataccagtcgaattccatcccgtgccacagttcgtctattttagctgccagtgctttttctttctcgttgccatcctttacgtattgccgtacacacagcagactttgcataaggaagctactttctaccaggtcgccaccgtcatcttttgttccgaacggtttcactttgcccgtaggaccatggagccaatgcggccacactccatgaaaacgatcggcttttgccagatagtctacaatctttgtcaaccgggctacaccttcttcccggttgataaagtttcgttcgatagccaccaacaagccggcaattccaaatccgctacctccaatcgtaattacatcctggtcctgttgtggataaacgttatcaagatgtatacgttcgcaggccagtccggaagtcttttccgcaccttcccacatatagttgaaatgcgtcttttgaatatagtcgagtagttcatcgtcgttcgcaaatgcctcgggacgatcaggctccgcatcggtcactgtcttgttcttttgtgtacatgcgcataccactacgagtagagtaataaatatgccggttcttgtccattccatcatcatataaagtatttcttctgattaataattattgtttcacgactttcgacaacgccgaccgtcccgattcattcaaagcttcaatggcaaagtagtaagtcgtaccaaggtcaagtccccggaagtcataatgatccgcaccgttcacggtgatgcagttatatagcttttcgggagcaatgccataataaatattatagccgtaggcatcggatgaaggattccacgaaatcatcgcattgcgcttatcctgtttgtcacgtgctaccttgaagtttcgtacaggcagaggtttctctccatcagcaaaaccaaacacccggaattccgaaaggcaaaagttgccggatggaacatgaatgttttccagtttcagataacgggcatccagcgtctcacccaattcgatatagtcatgaggtacatctttatcgttatcacttttatctaccgccagtgtccagtctgtcccgttatcactggagtagatacgatattgatagtataaatcgtttgcacgattatgctgcacacttttatggtcatagtagttgagttggatcgccttgatgtgtttcatggcgccaagatcaatttctatccactcacccggttccccggttttagcagcccaatacgtacgcatattttcatcggtaagattggaagaggaatagatgctgtcggtactggatacttttaccggtttctcataagaaaggagcatccagccggtaaaccggtcaaccggatttttaatatcgtagtcagcattccagcaaggataatcgccgaatgctgtggtagagtacatcactccatccggatcgaatgccgtaggatataatccgatacgcctttcaaacttatatttgagagataacatacaggtacccacatgccagtaattccctttcaaatcttgaaaagtgccactgtgtcctactccctgtacaaatccgccgggcttatagctcatcggattatgctgctggtaagtgaacggccccaatggcgaatcgctgacatataccccgtcggcatataccttgaactccgttcccggagcaccgtactgaaaataatattttccgttatgcttcgtcatataagccccttcggtaaacggacgcaacgttacttcatcatcattattcatgccaaaccgttcccagccatgttcttccggacgaagcatcatgatatcataaatcttactgaccggacgaaaatcatcacgactgacctgtacgcctttaagagggtactcattactcgaaccgtaataaagatagagtttaccgtcatcatccaaaaacaagcaagggtcccatgaaggtaacgtattacgttcgatagcacgcttgaaacgcccggatttgggagatgtgctataccatacgggcaatccttcataagtagaaccggtatagaacaacgtatctccgcttacaaatgctgccggagcgcacatatcgtcatccgtaggacgacgctggaaagaggccggagcaaattcccagtcacttagattcttcgaataatggaagcctccttggttcgtggaaaacaggaaatactcatctttataagttaatcccatcggatcggcagaagatctgaacgatccgttagactgaacattgttgttataaggttcatagttataactaatattcataggattacaataggtacgagtgacaggatgcgcagggtcataccaccttgtagcttgagcaggctgacgctgcacagacttatgcttccctgattgcataacgattttcacttgccggtcgtcaacagcacgttttacattggcaaaagattttcccggataataggcataaagatgcacatcgttatcagtagccttcaacgtataacggccttctatgttcgtgttacaatgaaccggactcgagaaaaatataacggtagccccttcaagcggattaccctgttcatctacaaccgttccggttatttcgtattgatttactaccgggatatagtagtcacttacctgtccttttactacttttatagaatcttccggtggtagtgcgttccctgccaaggcagagaacgctatcccagaacttagtaatatcttttttactattcctgtcatttcctaattttatttagacataattactcgtcaatcggttcgttcgtcagacttgggatattagatacctgatcgaaaggaagcggataataggttttatcttcagtccatcctttggaaccaagcacagaagcagccttaccggtacgaatcaagtcgttgtaacgctctccccactcacaaacaagttccatacggcgttcatcaaggatttggtctactgtcgcattatcaatctcggacatcttggcgcggtcacgcacaagcttcaacggtgcatcaccatccttacccaaacgtaccttagcttctgcattcatcaatagtacatctgcgtaacggaatatacgtacattgttatttgcaccatatttagtacgacctggtgtcaactgatctgtcggagtataggcttttccattccagcaatctgtttgagtagagttctgcaattcacgaatcacatcaccgcttggagtagttgtaccagccaacaggaacgaagtcgtagcacggatagtctcaccacgagccgctgcccaatcacggaaatctttatatataccgataaatccccagcctgaaatatttccgtcgttcgccggtccttggaatacaaaccagttatcagcatctaccatatcacctgacccaagaccaaagtcagtacactgacattcgaataacgattcatcacaaaccttacccggaatcttgaataaattatagtaatcatcataaagcttaaatttcttgctaccgataatatcatctgtcaatgtttcaacttctccataattaccctgattcagatgtatctttgctgcaagcatctctgccgagaaagcagtgacagcaccataatgagccatttcattcggacgtaatctcggagtatggtccatcgtatactgtagatcttcaagaacatatttatatacagcattgatcgttgaacgggtcatgtcggtttgagtattactacgcaaaatagttaccggaccaaaagcctgtacaagtcggtaataggcataagcacgaaggaacctcacttcaccacagtaagagcggtaattagtcatatcatcgtccgacgtgatattttctgcgtaggaatccagcgattcaagagcagcattggccacttttatgataccataatactgattccacatctcgttgagtccccagaaagaactgtcgtagttgtagttacccatatcaataagggttgcctggtcatctatacgtccggaccaaacatcatcatcacgcacgacagacaatggccatatcacccagtgcataccacctgttctaactttagcatatactccggaaaccgcttgatacatattctcaatttgagtaaagtctacattctcttccggaaccttattttcgggctctttatcaagataatcacatgatgtattgcataacattaatgctggcaacgcatatattaagatattctttagtattctcattttcttgttcttttgttagattaaaattaatttttccattccggcttagaaatcaatctggattccaaagctataagtagatgtcaaaggataaacttctgtatcccatccttcagcatcgctcaactccggagtgaatgaattcgccttaaatgtcgtgaacggacggtctgccgtcagtgagaaacggatacccggcaatgtgtaatttcccatcttgatattacgcaaactataaccgagagttatgttctgaatacggaagaaatccgcactttctacaaaataagagttcactctttggtcagatacattccagccctttaccaatgctgcagcagacggatgcgagttagtagaacccggtccggtccaacgattctcatactgtgctttatcaaagttataattagactgtgcataacgcaaagcacgtttacggttgtatatctgtccacctgtttgaccatacgtagtcaattcaaaatccagattcttccagttcaaaccaagattaatgccgtatgtaaaattaggtatgtaagagccaagtacttggcggtcatcaccatcaatcacgttatcaccgtttacatcttcatacttgaagtcacccggtacaagattgttggctacggcaatcggatcttccgcacattcttccaaagtctgataaactcctacaaccttatatccatagtatgaattcatttctttgcctaccatattaatggtctttcctcccttgatagagctcaatcctccaaggtctttcaccttattcttcaaatatgaaaggttcactcccaaattatatttgaagtctcttccgatattatcattccagttaagtgataaatcaaaacccgaattcagaatcttaccatagtttccggcaagtacgtcattgctgaacggtaaacgcggagatataacagctctttttgtcaggcgatagaaatagtccaaatctacattcaaacggttcttaaaagtagagaagttcaaaccgacgtttgtttcatctaccagctcccacttcaaataactgaaataagttgtattttgatagcctgggaaagtagagtttccaaatacaccggatgcagaattacctgtggtaattgaagcaaaaccgtcacttgcagctacgtggtcattacccaaacgtccccagctggcacgcagtttcaggtaatcgaagaacttttgatctttcataaaatcttcttcactgataacccatgcagcaccaacggatgggaaatatccccaatgttcctgatatttggaagaaccgtccgcacgcatagtgaatgtcaacagatatttccctgcatagtcataacttaaacgggtgaaataagactgaccgcgatagcagtaaccatcatctccaagagttacaccttcagcatttccctgactcaaataaagccattcgtcctttccttctggtacattattagcttttccccacatatatctgtactgttgttgccgcatagagtaacccaacatggctccaaagttatgttttccccactgattattataggtcaatatattatcccaaatgtaattgtaatagttcgtatctttctttgtcaattctgaaacggcctgttgttgccagctacttacatagtagggagctatatattcacgaccacgaatggctgaataatcataactataactcgttctgaaatttaacttctccggcaagagttggaactgtgcatagaagttagtcaatacctgatagttctcattttgtgaatcataatagttggctgttgccacaggattgtagaagttagcagtgaaaccaactgcatcaggtgatgcatacttgtcggggaaagtattgtcatttgccggatcataaaccggataaatgcccggagcattaaatgcctgctgccaagctttattttgtggcaacacttgggtagagttactaaatacaccattgaaaccgaccttcagccagttggttgcttcataatcgagtgctgcacggaaattgagacgtttatagttattctctacatccattacaccatcctgatacaaataactcatacctacggaataagtgcttttctctgttccaccactaattcccaaactgtggttagtgataagcgcactccgcagtaactccttataccagtctgtgtctgaatcgaatttccagttatgaaaatccggatcggaatagtcaccgccgaatttatcaatagaggccttcatggtagatacatatgcatcataattagcttcgagaagcatagtagaatactcttgagagttagccatttctaaaacgtttgtagctttctgtacacctatatatccgttataggtaattttagctttctgattacgttggccttttttggtagtgataataacaacaccattagcggcacgcacaccataaatggcagcagccgaagcatccttcaacacggacatatcctgaatgtcattactattgaggaaattgatatcatcatagaacataccgtctacaacataaagaggcgaactgttggaaaatgatcctttaccacgaatagctaccttcggcccttctcccggagtaccgctattggtaacgtttactccggccactttcccttgcatagcagccataggtgaagaggcgggagtagaaagtaacgcttcccccttgactaccgtaatgggagaagtcaagtccttggctttggctgaaccgtaaccgatcacgaccacttcttccagcttctgaacatcatcttttaattgaacattgattacattcttcccttttacagcaatttcttgaggtatcattcctatataagagaaggtaataatagcatcttcgggaacgttttccaaagtatagttaccattaaggtccgagatagtaccagtataggtaccttttacatgagcagacgcaccaatgatcggttcactaaaggaatcaacaatagtacctctgattgttttgttttgagcaagcagtgtctgtaaacacaacactgcaactacaagaaaagtaatctttctcttcatttttttacgtattagttgataataaggttgctaaaaaatcgatgcaacaaaggaatggagtttttaaaattcttgcaaaataacgcatactacgctactacttttatgctgtacaacactacgtttttagtacgtttatcgcttgtagacacttattttggcatgttttttcgctgatttgggattttttaattatttgatattatatttgaaattattttccatcactataatagagagagtattctatgagacgcactgattttatctatttattatttattttcataggaggatgtttatccccagtaataagtcatgcatctacatttatgcccattgtgaccaactatacagccaaagactaccaagcgggattacaaaactgggctttagctcaaggaaagaacggagagatgtacattggaaataatacaggactattatgtttcgatggctatacgtggagtaaatatcaaatgcccggtaatcagcttgtgcgatccatactcattgatggtgaccgtatttatgtgggaacatacgaggatttcggctatttcagccgcaactctcttggtatacttgaatacacttccttatggagccaactcaagaatatcgaaacacacaatgatgaaatatggaatatactcaaaataggtgaatgcatttatttccaatcattcagttcttggtttaaatatgacggaaagaaagtaaccgcacactataactctcaacatttgccattgtattttcataaagcgcatggacaaatctatgtacagatggtcaacggtgatttttatcttctggaaaatgatgaatataaactattgattaaacgtaaagcattaaaagatgactctgtggttgcggtcattcccacagcaggaggaaaaatgattctatgtaccgagtggaacggactttttgactatgacggaaagacactttctccccaccctaccgctatcgatcaggaattaaaaagtcagcagatgaatcgtgccgtaatgattccatcagattcgacaatcgtactcggaacgatccgtaatggtatttatgccattgacaaagaaggaaaagagaagtggcattatgatatggaaaatcgtttatataacaattctgtattacggcttttctgtgatcgggataataatgtatgggcggcacttgatatcggcattgcattaatccataccggttctccctattccattctgatacctgaccgcaattcacagtcattcggaatggtatatggggtcaatgcatttaataatagtctatatattgctactaaccagtctgcctggttgtactcttttgccgaccaaacaattgttcctatccagggtaccgaaggacagaactggcatatcagtacatttgattcacaaattctgctgggaaacaatttcggaactaaaattataacgggaactgtagccagtaacatccctgaaacagaaactagtagcacgtgtctgcgcaaatgtataattaatgggcaggaagttctcattgagtcgtcttattataacctccgagtctatcgtaaatataatggtaaatggagtttttctcattccattgatggcttctggaatccggtacgccagttcgaggtcgatcatagtggaaatatatgggctgcacatatgagtctcggtatctacaggatagagctttcaagggatttaaaaaaggtggaaaagtgcacgtatatcaaatcattgtcagacgaagagaataatgcaagcctaatgcatgttatgaagatacgtggaagagtggtattgtcggacagcaaaagaacgtatacttatgatgatattaaccaacgtatcatacctttcgtacaacttaactccattctcaaaaatgggattaatatggctataccggtagatgataacctctattggcttaccgactatcgtggatacaccctgataagatatgataatgacaatttcaggatggaacgcttcatcccttcctcttttttcggacttgaatgcaatgaaaacaataataatgtatatgtaaacaataacattacttatttctgtctcaacaatggtatagggcgtttggatatgaatctgaaaaaagacactttgctgcaaaggaattctttactcattagaaaagctacttctttgtcgcaggattatcaattgcatctaatgcctgtatctgccaaaaagaaagacaacaagaaaatatggggggatataactttccatttgtcttatcctaattttaactgcgaaccgctccgtttttgctatcatctcacgggaagtagcttggacctgatgtcagaatcagccgatccggtagtcacatttggtagcttagggtatggagattatcattttacggcttcagtgaaaaatgtcgatggtcaggtacttagttccgtagaatattatttcaataaaccacgcccattttatctgtccatatatgcttggataatatatgtgcttcttgcgagtgtaatagtatacttctactctcgttggcatgctgccaaaatgctaagaaaacgtaatagggagtttgaaaaagagaaaatgaaacaggacttcaagatgttggagcaggaacatatcattgcgcaacaacgcgaacaattacttgaagcagaattacaggtcaaaagtaaggaattagccagcctggctctcgatgccgtagtccagcgtaaagcagttgaaagcttgaaagaggttatgtctgaacaagagcataaaggaattatcaatcaacatgatatagacaccatactgaagcagattaacggaaacctgaatgaggaggaattctgggatatttaccacaagaattttgatatgatccataagaatttcttccgtaacctgcgtaaacaatatcccagtctcacagccagtgacttgagattttgtgcactgttacggctaaatctatcgaccaaagatattgcgcagttcaccaatcttactattcgtggggtagaaacagcccgttatcgaataagaaagaaacttgccattcccggaaatattaatcttgttgattttctaattgactttacatagaaacatttactgaatattccttctaatttcacacccctattctgttgggattttctaaagaaactttatctttgtaatgtcaacaattaaaagaatatggttcgttttaatcttgttatcaccttactactaatgataagcatagctgtcaaagccgaactgaccaaccggatgttcgatgtcaggcatgtaggctatgcagaaggccttagtagccaacgcgttttttcgattgtcgaggatggagacggtgctatgtggattgctacaaaaaccggaatagacagatacaacggtcatacggtaaagaactatgatttgccgggcagtttctattatggtgatcttgccggacgcaggctttacttattgtacgacgcacaacaaggactgttcgcctacgaccacaccggacgaatctaccgatattccaccatcctggatcattttgaacaagtcctccacctgggacaattgattcaggaagaagtcatcttgaacaaactctgtttggatagtgacggaacctggtggatgggagcggataaaggactatacaagcaagaagcagaccatcgtatagttgccgtgctgaaaggacaatatgtcaacgacatcgcatttgccggcgagtcgctttttgtgggcacttctaacggagtctggcaactgtcacacgccctgccggataagaaacgccagctgctggaagggtggaatgtacaaacattgttctgcgacaaaccgaaaaaagaactctggataggcacatttggcagcggtttgtctgtgatgaacctcgacacttccaaagtgcttgcgctggagggacaagggagcacgttccttcatccgatacgggcaattacagactatgatgtacataccatactcataggcgtggacggtggcggtgtgtatgcgatagacaaggacaccaagaaagcccgtttactgatgaataccagagatgacacagatacttatctgcgcggaaacggcgtatatgccgtaaccagagacgaccagggcaacatctggataggtagttatacgggaggcgtatccgtggctatcctgctgaaacatcccatttcgatattagcacacgaaaagggaaatacccattctctcatcagcaacaacgtaaatgatatcgaagaaaacccggatggcaaccaatggttcgctaccgatgatggaatcagcatccgaaacaccctgtcaggcacttggaaacacgtgctgaaagaaatcgtaaccatttctctttgcacatccggaaatgggaacgtatgggtaggaacgtacggagacggagtgtatctactggataacaacggacgcgtgttacgccatctcaccaagcaacaagggcaattgaccaccaattatattttctccgtcagacaagacatggagggagacttatggataggaggtctggacggatgcctgatcatgtttgaaaaagaaaaaggcagcagacggtctttcgacgtgaattgggtacagtccatcgaacctatcgaccgaaaccgggtagcggtggctacggtcaacggttttttcctagtggacaaacatacagggaatatacagcactatgccaattcccaagaatttcacaatcagaatgtcagtgcctatatcatctctatgctgttcaatgacgacggaaccgtgtggctgggaaccgaagggggaggattgaatctatatgacatgaaaaaccggacggtaaagactttcactgttcaagagggattgccgtccaacgatatatatagtttgcagcgggacgacaagaaacgcttgtgggtcagcaccggaaaaggaattgccttgatagacagcctgcgcgtgtcaaacctcaactatgcaggcaatatagacaaggaatataacaaatcctcatttgcccggttgatgaacggcgagttcgtgtatggcagcacggatggcgctgtctttatcatgccactcgacatctcaaccgtagactactggacgctcctgcgtttcactgggctgacagttgattatcaaaacgcccaggaagaagaatcgttgagacccgccatccatgatatgcttgccgaccgtgcggtacggctcggctataaatacaactcgtttaccgtttcttttgaatctatcaactatcgtttccagcgcgatattgtctatcagcatattttagaggggtatgacaatgactggagcaaaccgtctgccgagggcaaggcatcctacaccaaggtatcgccgggcacttatctttttaaggtgcgcagcctgcggcgcagcgacggaaagactatctccgaaagcaccttagaagtgaaagtgagccaaccatggtggaactcgtggtgggcttggactatttacctatttataataggcttcgttttctatttcatcctgcgctataagagcaaccagctccaaaagaaatacgacgaagacaaaatacgtttcttcatcgacacggcacacgacattcgcacgccggtgacgcttatcatggcacctctggaggatttgaaccgggaacaggatctctcggacaaagcccgttattacctgaatctggcccatgaaagtacccggaaactccattcgctcatcacacagttgctcgaatttgaaaaggtagacgcccacaaaccatcctcttcatcggttccgctttgtctgaatgaagttttgctgaaagaagtctccgtcttccggtctttttgcgagaagaagcagttgacactgaatctgacccaacccgacgaatccgttttcgtttcggccgacaaacacctgatagagatgttactcgacaatcttctttccaatgcctgcaaatacaccatgccccagggagaaatcagtctggatttgaaagccacgaaacgcaaagccatcctttcgttgaaagataacggaataggcataccgaagaaagcgaagaagcatatcttctccgatatttacagagccgagaatgcccggcagtcacaggaagaaggaaccggattcggactgttgcaggtgcaacgcattgtaaagatgctgcatggaaaaatcactttctgttccgaggagagcaagggaactactttcatcgtaacattgccgcgaaccaccaccgtaaccgaacccgtgtcgcacgaatcatccctcgaacaccttgccggcacatcggataataacagccacgaaacggacaaaatgaaagatccggacgaccggaatacattgctcattgtagaagaccacgaaactctccgtcactacctccgccagacctttgaacacctctatcgggtgattgatgttgccgacggacacgaagctatcgcctgtcttgccaatgaatatccggacatcatcctctccgacgtcatgatgcccggcatacggggtgacgagctttgcagaatggtcaaggaaaatcctgacacatcgggtattcccgtcgttctgctgacggcaaaggctaaccacgaagcaatagtggaaggattgaagaaaggcgcggatgattacatccccaaaccattcagtacagagatactgaaattgaaagtacaaggattgattgacaatcgaaacaggcaacggcagtttttcatgcggcaagccatcgctcaagtagaggcgggcggcaaacgtgacgacaatgaaagcaatgaaagtatcgacaacaaaaacgtaacgacagcaagcgaaacaatggccgagggcgaccgccggtttatcatgcaagctacccggtttgttcttgaacatttggatgaacccgatttcaacatcaatctcttgtgccatgaaatggcaatgagccggacactattctacagtcgccttaaatcactgacgggaaaagggccgcaagagtttatccgtatcatccggctacaaaaagctgccgaactgctgaaagaaggtaaaagcgtaaccgatgtcgccgccgaaaccggatttgtcaacacgaagtatttcagttcattgttcaagaaacaattcgggatgcagccaagtaaatatagtgggaagtagacaagcattcatgttcggttttgaattaaaattagctcgtttccggtacagtaatgaactgtttcagcctattctgacaagggtatattctcactgcaatgagaaaaagttctcattataatgagtatttcttctcatacctatgagtattttttctcatagtgataagtatacttgagaatgtttacggaagtttttttgaattataattgtatgagtttacctcatttccgtaccgttcttaattaaatgggaatttagcagttaggctgaaagccttacaattatatatttattggagtgccctgaaagggcttaattatatagcgtagggcaacgccctacgtaaaaacgacaatctgaatttgcgccctgaaagggcataattgtatacagttccgccctttcagggcttgtggctggtgtgttttttttcgtagggcgttgccctacgctatataattaaaccctttcagggcactccgcaaaattatcatttacctcattcttgtatagcaacaatcttcgaaaaagaatgggtaagataacgtccgttcgataaaaatcagcagatttgtcagcaatcaaacctaatatgtcagcaatctaaccatcgtttcagccggatattagcatctttgcaccaagctttacaagtataaagcacatattacgtttaacctttaaaatgctaaaacgatgaaaaaagtagcactattcctatttttatccgtttgcttcgcgcaacaatcctgttcgtcggattctgttggaacggaaccggaagaaaatccacaagacattctttttaaagacgatttcaactttttcgacgaaaaagtatggacgaaagaaactcatgaacccggctggaccaatcaagagctacaggcatacgatgccgctcatgtatcggtaggaaaggacggggataaatcggttctgattcttaccgccgaacgcaaagggaataaaatctattcaggcagaatcaattcaaaagggaaaaagagtttcaagtatcgcaagatagaagcaagcatcaagcttcccaagactaacggcggactgtggcctgcgttctggatgatgggagataacgacaaagaatggccggcatgcggggagattgatattatggaaatgggagaacagagcggaatggctgcgggcgattcggaaaaacaagtgaacaccgccattcactatggccccagcgcagcggctcacgaacagcaatactacaaagccaatgtggccaacagcctgcaagacggcaattatcacacctactctctggattgggatgaaaacagcctgacaatatccatcgacaacgtcaagtttcatacgttcgacattagctcgaacacatactttcatgacaacttctacattctgttcaaccttgccgtgggaggtgcgtttacagggattaccgacattcataaactgacgggcctgaaagacggtcagaaagtgaagatgtacatcgactgggtgaaaatattataggaatcttaaatatacatgctatgaatatggaaaaatgtaagtatctattgttttgcggaacactcgccctttggatggcgggaggtttccagcaagtgtatgcagcaacggaaccaagttcccaggctattcaacaacaaagtaacaaggtaaccggaaaagtgagcgatgccacaggccctatcattggggcttccgtagtggagaaaggaactgccaacggaacgattaccgatctggatggaagtttcagtttgaatgtaaaagcgggagctacgctcgttgtcagctacgtgggttataaatccgaggaagtgaaagcgggaagaggtcctttgaacatcaccttgaaagaggatgccaaagcattggatgaagtggtagttaccgcccttggtatcaagagagagcgcaaagcgttgggctacggcattgacgaagtgaaaggtgaagccttgaccaaagccaaagaaacgaatcttatcaactccatggcaggacgtgtgccgggattggtagtcagccagaccgctggtggtccttccggttctacgcgcgttattctgcgaggcagtaccgaaatgaccggaaacaaccagcctctttatgtagtggacggtgtacctttggacaataccaatttcggcagtgccggtacaaacggcggcttcgacttgggcgacggtatttcgagcatcaatgccgatgacgtagaaaatatgtcggtattgaaaggccctgcagcatctgcactttatggtagccgtgccagccacggtgttatcttgattacaaccaagcgagccaacaaggataaagtcagcgtggaatataacggaacactgactttcgacacccaacttgccaaatgggacgaagtgcaacagatatacggtatgggaagcaacggtacttatagctatgatgccatatccaacacaaacaaaagttggggcccaaaagcggacggttcaaacatgttgaagtatttcgacggcgtagaacgccctttcctcattgtccccgacaatacgtccaacttcttccgcacgggtatcaccgccaccaactccgccatcataggtgtgaacagcggaaaaaccggaattcgctttacctatacggacatgcgcaataaagacattgttccccagactcacatgagccgtgacattttcaacctgcgcgccaatacgtctgcaggaaaggtagacttggatttcagcgtcaactatacacgggaagacgtgaagaaccgtccggcactgggcgacagcaagtccaatatcggtaaaaacctgatgacccttgccaccacctacgaccaggaatggttgcaaacctatcagactgccgatggcgaatactccaactggaacggtatggatccctacaacgtgaatccgtattgggatatctataagaacttcaataaatccaagaaagacttgttccgcatgaacggcaaggccgtatggaacatcgacccacatctgaaacttcaggcaacgctgggtgccgaactcaactggttcacgttcgatgattacaaagcgcctaccactcccggattcgaagccggaagacttcaaaacagcgctttccgcaaccgcatgtacaactttgaagtgttggctctctacaacaaccattggggtgatttcgatttcaacgctacgttaggcggtaatgtatataaggtgaacaaccagaccaccgttaccaccgctcaagacatgaagatacgcgatgtcccttcattgacgagcttcaacgagatcagtgtagtgcccggcagttaccgcaagcagattaattcggtttacggagcagtgaacgtgggctggaaacacatgctttacctcgatgctacgttgcgtggcgaccaatcgtctacccttcccactggcaacaacatgtatatgtatccttctttctccggcagctttgtattctccgagctgacaaaactgggcgacctcctgccttacggaaaggtgcgtatgtcatgggcgcaagtaggtagcgataccgatccttaccaattgggactcgtctatacgaaatccaaatatgcttatcccggatataccatcggatatatcgataacggaaccatccccaacaaagacttgaaaccaaccaaaacaaactccgtggaaatgggattggaattgaaattcctgaagaaccgtatcggactggatttcacctactattctcaaatcagtaaaaaccagattatgggaatggcaagttcctggacaaccggttataactatcgcttgattaatgccggcaagatagaaaataaaggtattgagattgcccttagcacacgaccgattcaaacacgcgatttttcctgggacattaatctgaacttctccaagaacagcaacaaggtaaaagaactggatggcgaatcggatatgtttgaactggaaaaagcatcttggctcgacgttcaggtagccgctaaggtaggcgagaactttggttctattgtaggcccggacttccaacggaacgaaaagggagatattctgattgacccgcaaaccggtctgccacaatatgacaagagcaaccacgtattaggtaatgcctcttgggactggacaggtggattactcaccaactttacctacaagaatctttcgctggtagcggtattcgatgtgaaagtaggcgccgacctctattctatgtctgcccgtgctgcttacgaatcgggtaaaagtccggaaacactggcaggacgcgacgcctggtatcgctcggaagaagaaagattggcagccggcattgcaaaaggagccgataactggaagccgacaggcggattcgttgctccgggtgtcatcgacaacggtgatggaacatatcgtcccaacgacatctacatcaatccggaagactactggatgagcgtttgccgtaatgcaccttctatgtttatttacgacaactcatacgtgaaatgccgtgaactgacgttgagttataatgtacccaaatcctggctgaagaatgtagtaagcggactgaccgtttcgttcgttgcccgcaatccgttcatcgtatggaagaatatcccgaatatcgacccggattccaactacaacaataccaccggtatgggacttgaatacggttcgttgccttcacgcagaagctatggttttaatgtaaatgtgaaattctaaaaagatatatcatgagacaatctaaatacatcacaatcatcacgatggcatgtgccctgtttttcgcttcttgcagcgatgaatacatggaaaacatgaataccgacccttccaaggccgctaccatcgacccgaatgcgcagctcaccactgcccaactgcaaacgtacggagaccttagtatgatggaaatctaccgtaactaccattatgcattcacccaacaactgatgggatgttggaacaccaccaactacggcggacgccatacgctagacaataatgaaatgagccgtatctggacatcgttctacactcaatccctgaagaatatcattgatgctcaatatcgcacagccgaagatgcagagaaagtgaatatcaactctgtactccgcatttatcgggtttatcttatgtctatcatcaccgacacttacggagacgctcctttcagtgaagccggactgggattcctcgaaggaaagttcaatccaaagtatgacaaacaggaagatatttacaacgctttctttctggagctggaagatgccgtcaataaaatcgatccgaccaaagataaagtgacaggtgacctcatctatgccggtgatgtaactaaatggcaacaactggcaaactcgcttcgcctacgttttgccatgcgaatctccaatgtcaatcctacaaaggcacaaacggaatttgaaaacgctttggctgccaatgggggtgtgataacggacgcctcaagcgatgcgctcatcaaatacatgacaatcgcatttagtttcggacaagaagcttactctgattatcgcggaaattcattgtcacagttgttgttcggcaacgaccccgctaataatccaagttacctctgctccactttctttaatcagttatacaattccggtgaccctcgtacattcaaaatttcccgttgttattatgacgggctgatgagtgccaccagtcccgacaatcgtgtcgacatcacccaggagatgattgaaaaagggattgatttcagtccgcgcgacccgggtgcctactcgtgggagccatggcctacaggatacgacagcgatatttgtgcggaattagccgttaacaacccttctgttacagcaaccatggctcgtgaagtggaacccaaacttgccaataatttcctaaaaagcgacaatccgggcgtagtgatgacctctgcagaagtgaagttcctgatggcagaagctactgtgaaaaaatggaacgttggcagtgctttggcagaagatctttacaaacaaggagtgcgtgcggctatggatttcctgacagacaactacggttgcacggctactactgatgcagagtttgatgcattcattcaagataaaggggcgttcggacatacggacaatcagaaacttgaagctatcaatacacaggcctggattcttcacttcaccaatcctgccgaatgttgggcaaacgtgcgtcgttccggttatccgaagttgaaatcaccggcagaatatgggttcggacaatacctcaccggtggaacggaaattccggtacgtctatgctatcctgtattggaatcttcctataataaaaagagctacaatgaagccatcgagcgcatgggaggaacagacaattggcacagccttctgtggtgggatactgaaaactaactattaaacaatcatccattatgaaaaagatatatattgcactatttgccctactcgctgtaggctccacatttactgcatgcaccgaggaagaaccgttcgctacggtgacggaaaatgatgatccgcatatccttgccccggtattccctgacagaacgaacgggcaattggctacattcgccaacatcagccgggatgcgaacttatccatcgcgctgaccgtgactccgaaagattacaccacagtaacctggttcattgatggacaggaagtagaatcgggtaccgactccgacaaagaaatcaaccgtagtctgaaagccggtacgtataatttgaaaatagaagtggaaactgtgaaagggaagaagacttcccgtgaaggattagtggtggtcaatccgttggctgatgaccctcaatctaaagaagtagcttttgagagaattgtatctcccggtaagactgcccgtttatatggcagtaatttacagaacgtaacagccatcctcttgggaggaaacacgatcaccgatcctacttatgttgaatcggaagacgagaactatctggaatacatcgttccgacaggcgtaagcgaaggcgattaccgtatcgttctgcaagatgccgacggcaatcaatatggagccgacatggtgaaagtaaccaatgcttcccttgtcatttcgggtgctaaccgggctactgccaacgtggactggaccatttccggtatcaatcttgaaaacatcgcttctctaactatcggcggacagacggtgtctcaattcagcaatcaatcttctacggaagttacgctgacttgtccggatttgtctgatggaagctatacgctgacaggcaaaacccgtagcggagaggctgtgcagttcttgaacgataatattacgactaccgaacagactgtgaccgtatctaccgaaataacgctttgggcaggacaccattacgtttcgtgggataagccggacggtgaccccaacaaaacttttggtttgattccaatggatgtatttgctggtatcacagccgggtcgacactgaaagtagtctactccatagaacctactgccgaatatcataaaatgcagcttgccacaggctattggacaggcttggcgggtgagatggaatttacggaaaacggtgaatatacactgatactaacacaagacatgttgaataagattcaagctgaagccggattcttatgtgtaggacatggctattatgtagatttggtaaccgtgaaataatgttcctaagtaagtttaaaaatcattcataccataagtatctgtcattcttcgggttaaagccctctgaatgacagattacataaacgatgctacttaaaaacaaatcataatgaaactaagaaatattatattaatgaccgcatctatcgcaatgactgcctgttccaaacaggcagttcccactgccattcctgaagacgctaaaatagaacaacaagtggaagagcttctatcaaagatggatcttgacgccaagatagggcaaatgaccgagcttgctattgatgtattaggagagacgataaatggagaattccaattggacgaggcaaaactccacaaagcgattgctgaatacaaggtaggttcgtttctcaatgctcccggcccggtagcacaaagccctgaaaagtggaacgagattatcggtcgaatacaagaactgtcgatggcggagattggtattccatgtatctacggcctggatcagaatcatggtactacctatacattgggcggcacgctctttcctcaaaatatcaatatgggtgctgccttcaatccggatttgacctacgaagcggcacgtgtaacggcttatgaaacaagggctagcaattgtccctggacatactcccccactgtcgatatggcacgtgatccccgttggccgcgtgtatgggaaaattatggagaagactgtttagtcaatgccattatgggcagcactgctgtccgaggcttccaaggagatgatcctaaccatattcccgccgaccgaatcgccacctccgtgaaacattacatgggatacagcatgccacgtaccggcaaggaccgcacaccggcttatatatctgtttccgaactgcgtgaaaaatgttttgcaccgttcaaggcttgtgtggaagcaggtgcactgactataatggtcaacagtggttccatcaacggaaagcctgtgcacgccgaccgcgaactccttacacaatggctgaaagaagacttaggatgggacggaatgttaatcaccgactgggcggacatcaacaatctttatacccgcgaacatgtggcagcaaacaaaaaagaagccatcgaaatggcaatcaatgcaggtatagacatggctatggaaccgtatgatctcaattattgtacactactaaaagagttagtgcaagagaagaaaatacccatgaaccgtattgacgatgccgtccgccgggtgcttagacttaaattccgtctgggtctgttcgatcatccgaacactttattgaaagattatcctctcttcggcagcaaggagcatgcacttatcgcacttcatgcagctgaagaatcggaagtattgctaaaaaataaagataatattcttccgcttcctcaagggaaaaagctactggtaaccggtccgaacgccaactctatgcgttgcttgaacggcggttggagctattcgtggcaaggacatctgaccgatagatttgccgacaaatataataccatttacgaagcaatctgcaacaaattcggagccgatcatgtccgtctggaacagggcgtaacctacaaacccgaaggtgcttacatggaagaaaatgaaccggaaattgagaaagctgtggccgccgcccgcaacgtggatattattatcgcctgcatcggtgaaaattcatattgcgaaacacccggtaatctttccgagcttgccatctctgccaaccaaagcaaactggtaaaggcacttgccgctacgggaaaaccgatcatcctgatacttaatgagggtcgtccccgcattatcaacgacctagagccattggctgatgctgttattgacattctattacccggaaactatggtggcgacgcattggcgaacattctggcaggagacgtgaaccccagtgccaagatgccttacacatatccgcgacacgaagcagcactgactacctacgattatcgggtgagtgaagagatggacaaaatggaaggagcttatgactacaatgcagtagtctcagttcaatggcctttcggatacggattgagctacaccactttcgaatacagcaacttccaaacggacaaatcttcgtttaccgcaggagatgatttgcacttttccatagacgtaaccaataccggtaaatatgccggaaaagaagttgtcatgctattcagcagtgatcttgtggcttcgcttactcccgaaaaccgccggttacgagccttcaaaaaggtggaactgcaaccgggcgaaacccagactatcactctatccatcaaaggcagcgacttggcttttgtcaattccgacgggcaatgggtactggaacaaggggatttccgtatgcaatgcggaaatcaagtattgactattacctataagtaggcatttataagtaggtatttataagtaaatgtgcattattaatgtatacactcccgacaataactctatgagacactgcgttactttgcggtgaactcaaattatcatctaaccagttgaacagtctcaaacggctgttcaaccaaatttaaacaaccgctcctcttgatccaaacgaccgtatgtctacaacaaaaagacaatcgtttgagcccaaaggagcggttgtttttatctgaaggaaagcggtattattacaaaggatattcctcaaaagcatacaaaatggtagataaataacgttcgcctgtatcgggtaataatgcaacaatcattttcccggcattttccggtcgcttcgccagttccgtagcagcatatacggctgcgcctgaagatatgcctaccaacaaaccttcctgtttggctaattcacgactcgtacgaatggcatcgtcattctgcacctgaataatctcatctacgatagaagccttgtacgttttaggaacaaaccctgcaccgattccctgaatcttatgcggacctggtttacctcccgagagtaccggagaatcagaaggttctactgccacgatctttatactcggatcacgcatcttcagcgcttcacctacaccgctaaccgtcccgccagtacctactccggccacaaagatatcgactttcccctcggtatctctccatatttccagaccagtagttcgtaaatgcatggcggggttagcaggattctcaaattgttgtaaaatgacagctcccggagtgaccgccttcagttcttcagctttggcaatggctcctttcatgccatccgcaccaggagtcaatactaattccgcccctaaagctttcagaagattacgccgttcgatactcatggtatcgggcatcgtcagaatcagtttatagcctttagcagctgaaacaaaagccaatcccacaccggtattcccactggtcggttcaatgatagttgctccgggatgcaaaattcctttcgtttctgcatcctcaatcatagccaatgctatgcggtccttcacgcttcctgcgggattgaaagattcaatctttacaatcagacgagctttcaggtcgttacttgtattatagttactaagttccaataacggagtgttacctaccaaatccgtcaattttcttgctatcttttccatatatatctgttttaaatttctcttgttttaatatatgacaaagatagtgcggattctgttcagggtaaataccatatatgtggtaaattcataccacatatatctgacttcctaccagatattatattaagaaatcagctctcatagggctgaatgtatcaatcaatacacctgcttccaggcaaacacatccatgaggttggtcaggttccacataataaccgtcacctgtagaaagaatttctttccgatctccaatggtcaattcaaacttaccgcttgcaacataagtagcctggctatgataatgttggtgcatagagccgacggcacctttctcaaattccactttcaccatcatcagttgcccgtcataccccattatctggcggcggattcccggagccggtttctcccaatccaattctttcccaaactgaaaagcatcactgcgtgttttcatcttccaatctattcttatttataactacattatttgaatctcttcacataatctgcaatcagataacatgccgggccgagtacctgaccatgatcgaatccttgcatttcatacaaagtcaccttcttgttacctatacttttcaagacagcttccagcagcgcattttcttcatatcttgccgccatctccagatgcttgtcccccgtaatcaacacgagaggagctgtttccttacgagccttatttaccggagcatactcatcaaccaccggaataccgtcaggcaaaccgcgttccttacgaatagtgaaatgtgtcaccgtctgaccactcaccggaagataagcagctacactatcggcatctgctccgtatgctgccatgtattttttatccattgccagaatcaacgaaagataacctcccgcagaatgaccagaaacaaaaatatgatccttacgaccgccatacttctcaatattcttgaaaacccatgccacagcttcagccgcatcttcgatgtaagccggattctttactttcggactcaaacggtaattcaccgccactactgcaaacccttgttctctcaattctttgggaataaatttatttccaccttccataccaccaccgtgaaaccagacaatagttgagaaatccttcttgttttcaggataataaatatccagtttacaacgttccagacgataggtgtccgtttcggagccagagacataagatatatctttgtttgtgcgataagcattttgtgcttgagcaatgcaagcacaaagcaaaaagagaagaaggcaaatctttttcatgactttatttattttcaatggttcaatattatattaactatcagcctaaacagttcgttcttttcttcagacgggaacaaagataagaccttattccaaaaacataagcaaaaaagactaagaaaagaaagttgtattacctgaagcactaactattgattaaaaaggaaagttcttccaacttgaacaaacgctattcaatctgccacttcaaaatgaaaaatcacttattgatattgtttatataattgcatttcatccatactacattataagcacccaccgtctttagccgaacattcagcaccgaacgcccttccatcaataagcgtcttttaaataattatacacttgataatatatactttcaatgttctatttttaatattatacaaggaaatggccaattagaaaataacgaaccggaaaataaactgcataaataaatgcatgagcatacaaaaagatgcctaatattgcatgaaagcaaacaggatatgcatctttctctattcagaaaccgctcattgctttaaaaccaacgaagtgttcctcggtgtgcatcgacttgttcctcaccggggaagctatcgctcctcggtgaagaagataaaaatggactattaagaaacatttttatctctagtttaccataatatatcggaaaggaaaaaacaataaaatgattagttattcgggcatctgttctccaaataacaaaaatacataaaaatctatcgcagcttgataggcatattttcgaaacagcagaaagggagaatcgtgtaattacaaatgcaggacattttcctacttttctttaccaaactgtaattcacgtccttcttccaatgattaaatattccttttttaagaatcatcgttttttaagaaggttactaattccttcagaagactcttttaacttttatccttcaatagctcttttgtcttatctgccaaaaacagggggatattaatcaaattaccatcttgtttcaaattcagcattgaataccgaatccggtaaacgggttggaaaagcttctcatactgaatcagacttttacctgttacattctggtctgctttcacttctatcggataaatatgattgtcgtattgaagcagaaaatctacttcagccttattgccggaagtccaataccgaaaagatgcctggaactgtgccgtaagactctgcaacacataattctctgccaaagctcccttatattccatatagccgggagtagacagaagcaaaacacttgcgtccagctccgacaactgcctcaacagtcctacatctaatgcgtaaagtttaaatgtactcaaatcatcatacgctttcaatggtaatttgggtgacttgctcaatacgaccttattgataagtcctgcctgctccagccacaaaatagcatcttcatactcacgagcacgggcgccgggacgcaccaactgataaacaaacttacgattttccttcgccaattgtgaaggcaaggaattccatacataattaatgcggggagccaatgccgacgtagtatgttttacaaaatccaatgcatagtcattcaagatatcccgaagtgccgaatccaccttttccatatcattgaagtcaatcattagagtagcaggttcgggcataccgccacaaatggaataggcaacaaatgattcacgcaacttatcgaaaaatatttgaggaagaggagctatttctttaatagaacacagatactcatacatattcgggtcttttgtcttcagaaattccgtaaaagtaagcggatacatagacaaatgattcacctttcccaccggaaaggaattgccaatatgattcaaataaatacctaataaagaacctgcgcaagctaccgcatattcgggagcttcctcacaaaaatatttcagtgcgtttagtgcttcattacactcctgaatctcatccaatatgagtaaagtcgtttgaggattgattttcttcccatgcaagaaagacaattgctgaataatccgcctaggatctttagtcgttttaaagatatcgcaaagcccgctttcatctttatccaaactaaaataggcgacatcctcaaaatataccttcccgaaatacttcaaagcccatgtctttcctacttgacgagccccatgaataacaagtggcttcctattcacgtccattttccatgccgacaattgcctgataatatctctttcaaacataacaaatcacatttttaatatcagaaatgtgataatttacacatttttgatatgagttttgtgcgaatatacacattatccatataaaacgaaagaaaaattcagatattaatacttggcaactaataagttatatctgataaataaaatccgcggacaaatttacagacacgtataattaaaaagaaatccctccgaggacggaaggatttccagtttagatatgtatatcagcaccttttattttaagaacataggcaaaacagcaaagaaatcatcttaaaacataggcaagtcaatctttcattgtatcagcctttagttgatttttagattaaaaatgagaaaaatctataaaacctaacaatctaatcttttttgaattacatttgtcaaaaactcaacacaaaaagatatgaaaagaattttattagcaacattaattatcactattttatatggttgtgaaaaagaaaaaagtgaatcaatcaacccaactataactatagggaaagtcacacatttagacatatcaggtgctaaagctttatatactacagttaacaatattagcataattcaaacaagagttttaggaacaaacagttcatatgctttatataaaatacttgcagatggaacaagctcaaaaattaaagtacaagatgaaaacggaaataacattgagtttttcaacagcaaaatatttcctgctaatgataatttaatcgctttcaacttcgaaacatcagaaggtcaatacgaatactatataagaaagaccgatggagcagtatttgaaattccagaatcattttggggacaatatgatcatgagtattatattcctccctatgacaaattccaatacatatatgcaacaatcaatgaaaacaacaatcgtcccatttataaaattcaaggtaatatcaataacaaaattatagcaaacagaatatcggataactatattgtcaatcaatatgatgtagattataacggaactgtatattgtcgagtggaaagtactgaccacttactatgcatcttacctgatggaacaaaagttattggcgatagagataatatgccttcaggatttactttaaagaaatatgaaaatggcggtttactttattttgaagatggaaaacttaaacaaacattaattaaccctgaaactcaagtcataacccataatattatatacgaccccaatacaccgaatgatatttatttttcaatactaagaaaagataatatgactgttgcattcaataaagagaaagtattagtaataaaaagtccaaacaatattattgattatacttgtgcggttaattcttatacaatttatgatatacattgtactgaaaattatctttattgggaaaaagatggtgatattttccgccttaatctaacaaatggaacaaaagaaatgatatttaatggagccgggaattacattttttatgattatccaaacataatatactcgaagatatatgtgcaatctgatgatatagtacattttagagctcgaaaattttctactggtgaattggttgctgcaaaaattgataaaggcatatttagtgagaatacaatcaatgaatctaataatagtactattatatcatttatacaaataaactagcttccattttcaacaacaaaaacatagggtatcctcggtaaaataccctatgttttgttgtaacacaacatccactctttcaattaagctgccggatcaggagcttcccttccgctattgccacccggattcccaccactatctgaatctgaatcaccattgctatcgctcgctgacaccacttctaatgatatatattttgagatgctcatcttattcaacatgggttccaacttaatttccgagtagtaaatgcaatattaaggtttaataaagaacaaagaactatataatgattatattcaggataatatcatacttaatttattatgagattattataaagaaagtatgatcaattatcctgaataaaacatcttgtttatttcacatcatcccacgcatccgttcgaaaagggaatgcagctaatccaaaagtattacgcaatgaaatatttcctacatagttacgaaaagcataccgcacagctatcggttgttctacttgttcactccaaactctcactgtgggtgtacggtctataatttgtgcttgagccggataaaatttcttatcagcccctgcaatctcaaatcctttcaggttacagaatgctggtgtcaatccggcagaagcattatcaaaagtgacaattgccttaccttctgagtaattgactttcgtcatcgttggcccggtagatggaagtccacaaatgttatatgtcttagttaaagccagagtagccaaacgaagtcctactacatctttttgaggaggatgaatacaaaactcatcaccaatgtcggcagtagaaaccatgccggagttgggtattatttcaagagcttttatctgcgcttctcttaataaagccgcatccgtatcctgactatctttatacttatgaggagcaatctgaacataataaaaaggcatattcggtgcttcccaaacctctctccataactgaaccatagcagtcatcataggagcataacagtaatagttaaagatattcgactctccttgataccaaaggaaaccacgtgcggtaaagttcctcacaggccacaacattgtatcgtacatacaccccaagcgatgatgcatttttaatttcgaacttctggcagcctctatatctactccatcaatagaagctaatgttttctcattcatccatgattctatccgtgaacctccccagctactaatgaccagccctaccggaatatcgagcacttctgtgacttgttttgcaaagaaataagcaaccgcactacaagtcatgaccgcttccggtgccgatacctcccattttctcccttcaaaatcaatccgttgctgtgcatctttcgttctcgaaacagcaatgaagcggatacggttacgataattaccagcatgcagaatcgtctccaatgaacgatcaataggttgtcccgtatttcccatcatacgcatatccatattagattgaccggaacaaatccaaacctcccctatcaatatgtctgaaaggataacatcctctccatcactaattgtgatggaataaggcgtataacttgccccaggagtatccacctttaccaaccaagctccgttcttatccgttaatacctgataagtctgattattccaggaggtagtaacagtaactttcttattatctgcccatccccacagcttaacactactattttgctggagtatcatgtgatctcccatcatagcaggtaatttaacctttccctgtataaaagatgaaaaacagaagcataaaatcaaaatacttagaagctttttcatattgttcatataaagtttagcccaggtctacattaaaattgtatcctgggccaagattcgttcatatccgttaattcattaccaaactcatatcgtcaaggaacggctgttgatgtccatttcttctccaaacaatatatacatctgtcttatcggcaggcatagtgaaagtataagaaactttcttatgctcatcagaactgcttaaaactccatcggaagccgcaacaaatccaaaagtaacttccggagccaatggattagataatgtcggtatgtctgtttcattgatcaccgcaccaagcctgatatttccggtttgaggcatttccgccgctgaaggagtcttaaaccagaaagagaatgtataagacttacccggagttaatcctttcacctttctccataaccagtctaaagaactgcccgtttcgttttcacgcatacgtacaaataaataagatgatccggtgtgaggtataggcgagtttgcagcaacccggacggcagtggcacttgctccaaatttaccaatcccctgactgtccgatccgccccattctccaagagccggccaatatttgttggtagtaattctctcaaagctgtaatcttcttcaggagtatccaataagttcactccccccattgcttcagtttgctgaacaatatctacacttttagtgataccctgagcagtaatagtaacctttccttcccggatcacatcatccccattcttttccactacaaaattcaaggttccatcctccaagcccgaagtttcactggtaaaactaatccactctacatcggttgaagcctcccaatcgacattacaaacgaaagatattgagttccttccaccctcaaaatccagtttgataggacttttggtagtgatgtttaactgtggcgtagaagtatctctgtatttctgatggatattcaatcttttttccaactcaccagccactatcttaatcacaccaattctatccgccccctcatcatttttagtaacctttgcatttatggtagcactctgactgcccgccttagtgtccaaagtgatccaagtggcatctgttgatacctgccagtccaagttacaaaggaattctaccggtatagttcccccataagtactaagagcttcaatatcttccgttacgatataaagagtcggtttgttctgtatttcatcatcatcgtcacatgattgcaaaactccggcagacactccgaacagcccgatacctatcattatcataaatgactttatccaatggtctgaaatatattttctcataatctatcacttttgaattattcgttaatttctgctgaaagaagccgggtatatcccaataagtccatatatgacgactctctgttgaatgtacccgaatttatcaattgcctgatgggttcactatccggataatatcgcaaccccatttcatacatacccggattatcaccggcttttgtcatacgttccgtttcaccacaataatatcctgactttatacatgaatccatagaccggtagaaatcactgtaatactcaaaacagtaacgtaaattctctccggtcggagctgtatatgcaaacaaatccaacccattattataacacatacgagcagttgtagacaataatgtgagtgtgagatgcgtatattgtaatccttttaatggtcctgtgtcgtgacggtaacggtcataaatttctcccttcacaggaggagccgaaccagctttttctcttgaacacggagtatcgccatccatcaatatacagccgcttaacaactcttttacatcccttggatttgcaggagaatcgatagcaaactgaaccaattcatcattatctgtagccagtccaagcatcagtattcccattgaatgggctacaagatgattctgataatattgcttattaaagtaatcgttatcttcccacaaattgatactaatcatcccttccctatataacacctgaaaccaatctgttatattcttctttgtctcatcactcatgatattctccgaaatcagcatgtcataagcacaaaccattggatacatacctctggtaagatacatcgcactacccgcatcagccacataactaatgtctttacacgctttcgcccaaacctctattatttcaattgatttccgggcatattttttatctcctgtaaaccagtatgccaaagccagatcgcgggagtttgatccgggaacataactctcttcaataaactttgtaggatcttgtcccgtataaggagccgccgtataagtcagtgcattattacagcgcttcatcagattgttgtaagtcgttgttatacttgccgaactgttgccttcaaccatttgttttatattcaacaattcctctttggtataaaggatagaagggtgtttatattctatatcaatcgtttttacagattgcctgatctctattatctttatgttacctccacaagtaatagagagctttcctgtacgatcccctccagatgtatttttctctatatgaatctttatgattgcattgccgctaccctctgtcggccccccaaatgttatccacgacacatctgatgaaattgtccagttatcgtagcaaatgaacttaatcagttcttccccgccaccatatccaatattaacagcatcatctgaaactaaagctatttccgtattcttcgcattatcattacacgccataagcatctgtgctaacaacagcaaagtcaggatgatcgaatgtttatattctaatttcatattaatttcgtttaatagttaatgttcttattccatataaaaaacttcttccaatggaatactgacaggtgaattatccggattaactgccatgatatctgccatatagtcccaccattttttcacgatttcattatcgcccatatcttgcgagcctgcaccattattcttctgcacagcatacaacacattcgtttccttatcccagaatatagaataatcggacactccgttcgccttcaaaagctttaccaattcaggccatatttcgctatgccgcttttgatattctttttcaaaaccgggtttcagatacattttaaaagcttctcttttcattgttcacctccatttgtttactaagtacatacaaaaaacagacaagttaccatcccggattattaggtttcagagccggattccgctgaatttcttcacttgggatcggccatagataatctctttccgtaaacttacgggtaaagcgaatctctccggtaaagtctttctcctgacgattattcagatattgcacagccaccccccaacgtcttaaatcactaaaacggtgtccttcaccaacaagttccacagcccgctcgtgcataatacgttcgaacatatcctctttatctgaaacctgtaaccagaccggtccactatttaatgccggcatactcgttgactgtctttttcttaccttattcagttcagcgacagccttgtccaattggttatcttcattataagcttcagccagcatcaataacacatctgcaaaacgaatgatagggaagttgataggagtgtgattacgattggtgatggcaccacccatatcttcaatcggaacaaacttccggtaaaaatacacattccatcctctgtcattctgaataaaaccattggccaccgtagtacctgccgcaatcgcatacaattgctttttagcccctgttcccactatatagccattataataagagtaaggaacaatcaatgattgcatcattctcggatctctccctctgtaaatctcacctaataaagtggtatcagggattgcttccaatttctgtttggtcgaattcaaggttgcctgaaacgcttttttcttcacagcatcactttcattatatccgggaatataattattccagttaaacttctgtccatccttctcttcatacatatccgctaaagttaccgacggcatacaagtagcacggccaccaccataagagccgcgtgttccatacaaagtacaaagcggcataccatacaaattgtcagtagtacccttattttgaatggcaaataccgtttcattatcattaggaaccggtcctgccgaagtgaacaaagtcagataatcgggatacaattgataaccatactgattagttttgttatatacaatttcctcaaaatcagcaatcgcttcagaccaattctttgtatacagatgcgcctttccacgtaatgcataagccgctccctttgtcgcccttccataatcggataccgcccatttgagaggaaggtttgcaattgcaaaagtcagatctttaataatgaaattccaaacctcctctcttgaattacgaggcaataacatttcattgaaagattcggaaacttcccaactctcatcatagataggcactccgccaaaaaaatcagctaaatgaaaataatacaaagcccgcagaaaatgagcttctcccaagacattatttttcacctgatcgtcaattgacatgcttgatacattcttaataacggtattggcacgctgcacaccatcataagtgtcttgccagttttgcaccaggaaatcatatgcaccgttatatgtaccctgttcaacaggtccacccggtccgtgacctatatccgagtaagtgtcgaaaagaggcatataaccataagcaccgtaatctttcagttgggcatatacccccataactcccgatttggcatcggcttccgttttccaatagttattttgagcgaccttatcatacggagccacatccagatcataacaaccgctgaatcccagtgtcactacaaccgctaccataatataattgactgttttcataatcgtattttttaaaagactacatttacacctaccgttatctgcttcatcgtcggataagttgtaccacttatctccggatcaatccctttataggaagtaaaggttaacatattctccaaacttgtgtatagtcgaagttgggatatatccagcttttgaagaagtttcttaggaatcttgtatcctatctgaacgttctttaatcgtaaatatgacttattctgaacccaaaaatcactcggttgagcatttaacgtattcaaaccggtcagcaatctgggataagtagcatttgtacgcccttcccgccaggcaccttcggctatttctttgttgattacatctccataattaatatatcccatataaaatttatcctgccaatatacttgcaaaccagcatttccctggaacaaacaagagaagtcgaacccattccattctgcccctaatgagaagccatacgtcaaacggggagcaagtccatgccctactgcatatttatcattatcgtcgatgacaccgtcaccattcaaatctttatataagaaatcacctttcttcggagttccataagaagcaaatgggttaacacgttgtccggtggtaggatcgagcggtgcgtctttaatcatcttttcaacaaacaacatgtcttcgtccgtttgaagaatccggtctaccgccaatacatattgaatattgataggatagccttcttgaatcatgttcgtccccgaaatcgacctttcctctcctttaaaccgggttacttcattgtctatgaaagtaaaattaccacccacaaaatagtttactttaccaatcctatgattccacttcagattcatttccacacctctattccgcactcttgctgcattttgagtagggatagacgcattaccaacaagcaatggtgctggtaaatcgataagaatatcatgcgtatctttattaaaaagttctattgttccatccagctttgaaccaaaaagactgaagtctagtccgatattggtgacataggtcgtttcccatgaaaccattgcattagccagctgtatctgtgccaatcccggcacaacagagtttcctaaaacataattatctttattgtacacagactggtattcataattatctaccgcattattacccaatgcaccccatgagagcctcaacttcaacatatccagccatttaattgacttcataaagttctcttccgacatacgccatcccaaggagaaagaagggaacgtcccccatcgatgatccttatggaagcgggaagaaccgtcccagcgaatattcccttcaaacagatatttgtccgcccatgacaggtttattcgtccgaaataagaacgcatcacccagtctgttgcagccccacttgtttcagaatctccggtagcaccattaatgacagacaaattatctgcaagaagatcatatctcttcgcctcaaaccattttacattatccttttcctgactagctcccgccaatatacctacatccaacttatcaaaaaatgtcttctgataacgagctaccacatcagctacgtgatgcgtattagtccaattcttattccttacaaacgttctaccggctgccatctgggttattgtgttagattgaaaactccaacggtcagcataaaccggagtctcttcctcttgcgaattattacggcgatacgtgtaagatgcttctatatttaaacctttgaaaacctttatattcgtccaaaagcgggaagtgaagttattaacttcaatatctccttgatacatattcagaggatagagaggactttgcacttgctgattctcttccggattctcggcagatccatacctgccatccggatgccggtagacaataccggggctggagatgttactaaaaagcgaactcatgtatttggaacccatctcggcatttgatttcagaccgctaatattcatccccattgtaatccaaggctttagttcggcattcacattcaaacgggcagtaaatctttcataagccgaattctccacaatacccggattgttcagataagctacagatccaaatgctttcagtttctggtttccgacagagaatgataaattatgattagtagacacccctgttgaaaaaacttcatcctcccactttgtattcggatacaagtaaggttcattggggtgaactctccattccgctattttccgttccgaatataccggcattgctgtcgggtcaacattataagccgcttcgttataatactccatataatcggcatagttgtatacagtttcaattgtattcgaaggtttctggaaagaaacatacccattataggaaatcgacgctttgccttccgagcctttcttggtcgttatcaagataaccccattggcggctcttgaaccatagatagcagaagatgacgcatctttcagtacagaaacagattctacatcctgtgggttaacctcatttatatttccttctgctccatcaataataatcaatggcgaagaattattcagagttccctgtcccctgataagcagggtggctccatcgttattaggacgggctgatccctgattgacatacagtcccgaacttaatcctgccaatccagttgaaagactggtcatcgggcggctttcagcctgttcagtcaggttcaccgtagataccgagcctgtcaaattcacttttttctgggtagcgtatcctactaccaccacttcttccaatgttttcccatcctcaaccaaagtgatagtcgctccattagcctttgatgcaatcatttcctgagaagtatatcccatataagagatgacaagtatatcttttgcctgaaccttgacagaaaaccgcccctctatattagtaatggtccctgtttgcttcccttttacctgaacggtagctccaatcaggggctcattgttcacatctacgactttaccgcttatgtttaacggatcttgcgcccacagatctcctatcgggatcatgagcatgaacataatcacatataatgaatatattcctttactgatgtttctctgtttcatagatattaattattaaagattattttattcaatacagcgtccgtgagtcagaatcaccggacctaacaaatgcaggttatgagctgtacgatcattggtacgcaaaacctcattaaagattttctcctccggataacggacatgccctacctcccacaatgtaaatactgattgatcgttgtagttaatccaagagtcttcacctgtataaaatcctcccttaatagaagcatctttagtgatataaaaatcagcatagaagagcaaaggtaatttaatactctcaccggtaggagctacataatgatgaagatccagaccgttcaaacgtcccatctctgctgctatcattagcaaattagtcgacaatcccgcatactgtaaggctctgttcggctttgtagtctgtccgtaatgagtcaatgcaaaatgtctgtaacgatccataatctctccatcctgtgttggccatgagccgggctcaccacagtaaggcggttgtcctttcatcaaaatgataccctcaattaccttctttatattatgtggatttgtttctccgtcatatacataattcaccaactcattatcacgtaaaataatgccaatagacatcaaccccacaacttctgcaactatatgattctgaaaatattgttttccaaagtagtcattctccacccagcgtttcacgccttcttctatatgaggaagcaatatccggagccatgcctcaaattgtttctgcttactttttcctatcaagttatccgcgcaaagcaaatcataggcataaaggaatgcaaatacgccacgtgaaaccaacataccggtattaggatagaatttatccggatcgaaataagtgcccggagcatttttaggagaagaccattcattgattatttcaatggctttgtgcgcataacgtttatctttagtgatctgatagcctattgccaaatctcttgcagccgacccgtcacgtatggcggctttatagaaagacatactggcatctccccgatatacattcggtttccatttctcatctgcataaccgtctatctcactttccagttttttccaagctgttttccaaggctcaatgcccgaaagagcatttccccgcatcaactcaatgtccgtactcgacagaatcaggcggggatgttccgctttaattctaaccggttggttttgagaaagtgacttgcctgcgatgagagccatcaaaaacagtaacaacgataccttcatcaacttgtttttcatatagtaatgattttagttagtaactctattctttcaagtgcatagctctatacctcattaatgcttctacaaaataataatctgcataagtcagggggacatccacttcgctattctgtggtaaaaagcctacgctgtgtttaagtatgaaattgcagttttctcccggctttgccagatactcatccgaagccaatgttctaagctgtgtttcggcaacagtgatatatccttgtccggttaccttgtctacataacccgacaattccagtaaagcagaagccataatggcagcagctgaagcatctctcaaggcatccggaacttttggatcgtcaaagtcccaataaggaatcttatcctgaggcatcttcggatgattaagaaggaagctggcaatatgctttgcctgttccagataacgtggttgtttcgtttcccgatacatcatagtatatccatacaatgcccaagactgtcccctgctccataccgattcgtcactatacccttgccatgtacatttctgaagtgcatggccgctaattgtatcataattcaccacgtgataacaactataatccggtctgaaatgattctccattgttttatcagcatgagaaattgccatatcatagaaacgtttatcaccagagaactccgttgcccgacaaagtaattcaaggttcatcatattgtcaatgattacaggaaactgccaatgcaaagtgcccggatgactccatgaacgtgtgcatcctacagcagaacggtaacgcgtagataatgaccgggctgtagtagtgattatatcccggcaggaagtatcgcccaatagccggtatttatttccgaaagaacagtttatcataaaaccgacatcatgattatctttattatacttctggatctcgactctatcactcatcttggaagccatctccttgagctgctcatctccggtatattcatacaaataccaaagagtcccgggataaaagccactcgtccagaaataagaatccgaggtttcaagcgcgccattcttatctatcgaacggggtaacatctccggaatagaatccatgacagagtacatatacttatattgttctaccgcccggttcagggcatcatcgaccatgcgttccatagaaggttccaaggttttcgtacatcctgataccatcaatgagagcagacatatcgccacataatttttcatattttctttgcttataatttgagatatattaaaaatttaaagatccatgcaaaggttttctcccgatagcaagagcaaaagtaggagattacgggaagcagcattggataaaaaagttccaaaggttccataattttgttcacatccctattacaaaccgttttttgtttcattatctcaaaaaataacgatacatttgtgattatcgaacctgctatcagatataagatatataataatagtcccccattatatgaatccctaagattaataccaaaactaaatataagaagttttggaaacaatagaaacttaattaacgcttttaatatatgcctgaacataacagactagtcgctattatatttatgctggtttcatgcgtctcatccatcactggattcgagacggtaaacttccagcatttatcactcaattccatgtttccccaaattacgattaacggactttatcaggatgaatcgggtatcttatggattggaactaaagacggtgtgaagaaatataatggaaattatattgagtcagtcaacttcatgggaataaacaactggatacagtccaaccttgttccgacaatctgtggagacaagaaagggcacctatatgtcaatacggattacagcatcattgaatatgacctgataaaagaggaaagccgtatcatattcagccagccaaacacacagatattgccgtccattgccttcaattatggtaccaactcattatggatcggtttattggatagtgtctataattataaagaaggtatatgccaggccaaatacaaaattgatggcaacaacctaagcatctcatcgctgaaagaaacgtccggcaaattattatatatcggcaccaaacatgacggggtatttactattgatctatcaggcaggcaacagaaagtactgactacccgcagtgaaattatatcgataaacgaagatagccggaacaacatctgggtgagcaccctgaatgaaggattattcaaactaaatccatcgggcgacgttatccaatacacggaacctaccttagccagcaattatgtaagaacagtatgtgaagataataacggaaatatctggataggaaccatgttaggattgaatgttatcaactcgcaaacaggtgatatcagtttttatggtctggaaaaagagggtagtgcgggactaagcaacctctctgtctggattattatgaaagacgatcaaggcacaatgtggttcggtacctactatggaggcttggattactacaatccgcatactgacatctttgaatataataatctgaaactggggcacgccggtatcggacccgtaatcagcaagattatagaagacaagacaggacggctatggatcagtacagaaggagacgggttggtatcctatctacccgagacagattcatatacatactatacgaaagagaacaatacaatatcccacaataatatcaagaccttatattatgatgatacatccagtacagtatggattgggactcatctcggcggactttgcagttactcgattgataaaaaagaattcaaacatttcactatcgacccgtccgaccatacgaaacggtcggaaatagttcaggctatcatccgtcataaagatatcttatatctgggtacgctttcgggggtatattatatgaacctggaagattacagcattcaaaagctacaccttctcgacaaatacatctatgctgtaaactcattgatgatagacaagcaggacaacttgtggattggagggaataacctgtgctattacagtatcaaacagaattatgtacgcagtcttgacaaatatcttgctaaaatcaccgcttcttctaagaataccattacgtctcttattcaggataatagcaatcgtatcatagccaccacattaggtgcaggtattcttatttatcatcctactcaagataggctcgaacaaataaactgcaaaaacagtaacctcgatagtgattatctaagtgccgtttatcctctgtccgatcatcaacttttggtcaccagtgcaaacggcttatcctatatcgatctcaaaacaaaaagaagctataattataaatcacaaaacaaattcgtcttgccgtcgatgattccgggtgacataatgaaaagcagtgatagccgtatcatcatgggaggaataaacggccttgccatgatttctgaaaataatttgtttccagaaagtctacccactaaaatgttcttttccaaactatttgttaataacaaagaagtgtcggcaaatgattcttctcggatattgcctcgttctctttttgcaacagatcatatcaaattgaaacattatgagaataatatatctgtcgaaatcggaatcaatgacttcgtaaatctcggacaatccaaatatcaatataaactggatgggtataacaatagctggattgaatttcatccccaaaaatcaatcaactacatgaacttaccttatggagactataagttaaaagtaagaaacatttcctttaaagatgaaaccgaacttaatgaaatcagtctggggatcacgattatccctcctgtttatgccacctggtacgcttatctattatatacgttgctaatattagccatcattatcagcattgcctatttctaccgatccaagttattgttaagaaattcactggaacttgaaagacgggataaactacaaaaagacgcgataaatgagtccaaaatgcgtttcctcgggaatatatcacatgagttaaaaacaccgatcgcattaatatccggacaactggaacttattcttatgtcaaattactcattgtctactatccagaacagcttgcgtgaggtacataacagggctgccaaaatgggtactttaatcaatgaactactcgacttcttgaaatacaacaaagaaaatttcacgttaacagtcaaacagcaggatataattctattcacgcaggaaatatatgattcgttcgttagctatgccgaactaaagaatattcatttcaattttgtgttcgaccaaaaaagccagtgcacgtggtttgatgaagtacaactacaaaaggttttcaataacattctatcgaatgctttcaaattcactccggaaaatggaacagtcgagatcaaaataacgacttctgcgtcttccgtaattataacatttaatgattccggcattgggatacctaaagacatgacagaacgaatctttgaacgtttctttcaagtaaacaactctgtaaacagcgaactatccaacaccggaacagggataggcttatcactgtcactcaatattgtaaaggcacatcatggacaaataacggttgaaagtgaagtaggaaaaggtagttcattcattgtcgaattaccaatcggtaatgagcactttaaagaagataagaatatcaccatcatagagaatgaaaagaacacagggataatcaataacccgattagtatagagaatgaagaagagagcttggaaaatctggaagatttcatcatacagcaaaagaaggatttcgatcattcatcgactttacttatcgttgaggatgacgatgaattgaggaaattactcatagagatatttgagcccatttttgaaatctatgaagcaaagaatggtgaagatgcattcaaaatcgcacagctcaattcaccggatcttattttatcagatgtgatgatgcccggcatctccggtataaatctatgtgcgaggataaagtctcattttgacactagccatattccggtcattctgctcacggcacttagtagtgtggaacacaatattaaaggactcaattgtggagccgatgattatatcaccaaaccatttaatatcagaattctgatcgcaaaatgcattaacctactaaataacagacgaaaattacaggaacgatacaaaactttagaaaacagtagtgcagagcaactgaccagcaataagctcgaccaagatttcatcgatcatataataagaattgtacaaaccaagttggaagaaggaaacggagatattaacgtcaccctgttatgttcagaattaggactaagccggacaaagctattcctgaaaatgaaaaagataacaggggaatctcctcattattttattcaaaatataaaactgaaaactgctgcaaaaatgcttcgggaaaatgaagaatataacattagcgacatcagtttccagctggggttcagctcattaaactattttggaaaaagctttaaggagtatttcggaatgtctcctactgcctatcgtaagtttcaccaagaacaaaaagataatcactcaatatagtaatatggatgcgtgcaagacaaaagtaccttgcacgcttcaccacttatttaaaagcaatcataatctgctcattacctcccttatcaggcattcgcacactacatacaccagtttctttatcccaactccataccacagtttcagtgtcattctccagattttcttccaaacgttccggtttagttttctttatcttctttcctttgacagttacctctttcggggctttcgcagaataaatacggaacaacagatttctcggaccgggaacagtatatccttttccttcacgggcagagacagtcaattcatatccattcgccaaagtactgcaaataatcggtgttttgacaaattcatcacgctggtaccctaagttttctccttcatcttcgtaaagagtaaaggctgcctgtgcaccttcctgtgtgggaaagatttcaaaagtaagtggatataccggtttctcatgggtgtagttcattaccggcatggtagggatgatagaaccttgcttcacaaacataggaacagaagacaagggagcatcaacggtagtccattgctctccggtgtagaccgtctgcttgttgttgtagtctatccatgtaccttcgggaaggtacacgttctttgtgcgggcacctttcttcaccacgggggctaccaacaattcacgaccgaacaagaattgggcatccgtagaaaacgtttccatatccattggatattcgagaaacagaggccgcatgataggcaatcctgtatcatacgcttcgcgggcgtaagtgtagatatacggcaacaaacgatatttcagctcgatagccgctttcgcgttcttttccgcttccggtccgaaaagccacggttccaccgggttatctccctcatggtgaatacgactcaaaggattgaaggcaccgaattgaatccaacgggtatagagttccgccatagccggataatcctcaatatccccacagtaaccggtgatatcgcaggaagaaaatgggattaatcccaatccggcggaaagcattacaggaatctgattggctaattgtccccacccttgcagtacatcgtctccgtttccgctatcacccgtccaaccgaacgtataacgttgcaatccggcattagcagcacgagtcatttggaaaacacgacggtccggattcctcttttcaaattgctcttttaccactttgtcccaagtcaggccatagacgttatggatttcatcgtgcataccgagatggtgcttcatcaccaggcgttccgtctgctcctcgttactccaggcaggttcgcccatgtctgtccagaagccggagacaccatcatcaataggtttctgctgataagttccccaccagtcggctacggcaggcagggtgaagtctaccactccgcagtttccaccccacggccagggcatatcgtagcttttaccgttcgtactgtcctttacaaaatagcccaggcggtctgcttcttcccattgttttttgttggcttgtgcaattaccgggtcttgagatacgactaccttaaaacccatctctttcaaatccgaaagcatcttcctagggttttcatagtttcctttgcgccattcgaaatcctgcaagtattctgtccagccgatatcctgatagataatatcacaagggattccccgtttccggtagccttcggctatctcacgacttagcttttcacttgtcaacagaccgcggcattgagcaaaacccaacgcccatttcggcggcatgataggttttccggtcagtccgacgtattggctgatgatttctttatagtctttaccgaagataaagtaatataccatttccccgttcggcgcttcaaagctgtaataatcacggctttccgttccgaatttgaattccgtcttataggtgttatcaaggaaaataccataccggtaattgctcataaagaaaggaatactcttgtaaagaggatcttctaccacgctatagcaaggtttgtcactattccacattttataagactcgccacgacggtccatctttcccgctttctcaccaagtccgaagaagtgctcgtcacgacgaagcactttgtattccaccttcttcgttccttcactgacatggcctttatcggcataatcactaaacaggagtttctgatatttatcgaatatctgaagactcatcggagatttattcacccggatacgcaacttcggagtaaatatctcgtaacaggccgcctgttcatccacatgaatagttcctacctcttccagttcttcattaatcactgcaaacgaagtatttcttcgttgcaattgcccgtcgggtgagaaccagattttcacgacggaagagctgcaaagttgcaattgcaaggcggcactgtccgccaggtgaaaagtcacctgacgtccctgctgtgtaaaagaagtgcatgtacgtgtcgtattttccgcccaaacccatgttggaaatatcaggcacaacacccatacccataatctatatctaatcatcatacctatcattttagttattctgtagcagccgctttattcaaccacaatcatcgcccaatatttcagggaaggcaatgtaaatgagacaaccccgttctcctgtgtaaaggccaattcctgcaaagcccctccgtgtacatccggcgacgctacccacagcttattcacctttgccgacagattcatttgcaaagctgcttttgtaatcagagccggttccggcatcgtaccgtccacatctctccagctaagactgttcgcttgcgagaaattaagaagatgtatcacttgcttgccacctacctgcttggcataagtcgtaactgatccctgttgaggaggccaactattcaatctcatttcgccattggtacaattcatggaaacactattctctgtaccaccgtcacgaagcagattctgataagaagtcaggaaatcataataacgaaccatcgctgttttcaattcttcgctcattgtcaggttctcattcggaaagtactctttgcacaacatgtgatcgcctcccaactcaaggtgcgaaccacccaaagcaaacatgacagcatccgtcagcagaatacccggcgtattaaattctccccggttatccgctttattataattcatataagctgcaaaaaccgtattcaactcataattgccatagactccattttcataaagaatggctttcagattggtaaaatcagcctcatccgcccacacctcattatagaagaaatcaactttacctgtctcccctatctgacgggcaccgtaacggctgaccgcattcatcaccaaactcttgtccggatgagcctgcttcatcgcttcaataaaagaagcatatccctcacgcagattgaccggaataccattgtaattgtaaagcgtgctacgtcgtcccaactggtctatctgatagccgtcgaaggcaaagttcgcgtatacatcatcattcctttcgttcaaatatttctgccattccttattagaagggtcgaccagataaatattacttttccatccgcccggcaaatcatgactgtctttagtagtgtgagaagcatccttaaacaaataccattcctccttcaccccgtccgtagcagcatccttcaacgccccgaaacaaagattgtaaaacatagacttcataccgaaacgatgctgcgcttcaatgtaatttttcaccgaacttgtataaacctcccggttagcgatgtccatatatacttcgtccaactgtgtgcgtgtaccgcccaacggccagtgatgtttattatgccagtcctgaaactgtacccaattgatgtgatgacgattcagatacgccatctcttcctgtgtcttttcagccgtcttctcctgactgaaatcagcgacaaaaccataacgcggaaaacgtgacggatcactggatacatctaccgcaatcgtaccgacaatcacatccgtaccattctcctgacggtacagttccgccatatatcctttgaaatcagtagtaggcggttgccatgtccagctcgtaccatttaccgactcttctccgacaacctcccctaaaagacgatagcgaactttagttccggcaggcaacgcatcttctgctgtaaataccactttctcccccggtttatagaaagccttatccgtagacaggtccacacttaaatccgatgttaccggagtcacttcggtaacactgcccgaagctccttcattctcctggttcgacccatgatcgtcactgcaagccatacacagaaaagcagccacccaatatattattttcttcatcttgaattcttgttttattgtttcacaatcgaaatcgtctctttcaactggtctatcgtaatccgataagaaccggcttcctgaatattccacttataatccaaactacccaaatctgcatccggatacatactgctcaactccgcatccgacttagcaacaaacaatgccgtctctacttctcccgtcggagccttgttgctcttatccgccataaaccaatccccgttccagtctgattgcttgtcgcaggaaatcttcatctcacctgttttcagtgtcccgctccaggtaaagatgtaaggactgtcggcactcttcgtcatcggagtagcattgcctaaatcccatccgtttggagttgcctcacccaccagatacagcccttcgtaaggagtgaacggacgcatcagcatcttttcttttcctttgcctgtatagaaccatactttataaggtttgccacattcggcttccttcatctgccatttattatcgtcacctccaagcactactgatgtcgaagtgtacggagcattagccacagtaggatggaagaaagcatccgcctgaccgaaatctgtcacagaagcgaatttaaattctccgtccgccttccagggaatcacggctccataatggaacagatccatttggacagcatctttagacagtgcttcaaatccccaaccattgttacccgtaaacgaaccgacaatgaaaaattcttcatatctccagccaatatcttctgtttcggtaagtgtcaacgtcaagtcgagcaggtttgcttttacgatataagttgcttctttactgattgtgaactgttcgtccggttggtcacccgatgtacgataggtcagtttgaatccttctccggcagtggcatcgcggttgtacgacggcaggaattctcctaaagtcgttataaacttaaacgatccggtattcagctttcctgtccatgtaaactgtccgttatccgtgcgctccattgccgttgcgttatcggcactccatccgttcggagtagcatcaccaatcaggtaaagcgtcgtagtaaccggctggtaagtagtcaccgtaaaggcagtcgtcgcaatctgcttctgatcttccattccggcaacgacggctgtgatacgtgcttccagctctgctttcacagcataaccgataccgaactgcgtatgcagaaattggttaagttcttccactttcttagtccattgatacgttcccgtacccaaatccaccgaataagcattcgcaaagtccgttccggctttcgccagttccagcgtataagagatacggttaccgcttccataattcgtaccggtagtccatgaaagcgccaatgcttcctggctatggttcttttcgttcaacaccaactcctgctgattcaccgaaagagtgagggtatcatgtcctttatctgtctccatataatcctcggtacaagcaaccatcgttgcgccgatgaaaagagagcataacaactgatatatatattttttcatcatattatttgtctaaatgaatgattataaaacggattaataaccgggattttgagtcatcaggtgattggagtccatctccgtctgcggaataggcaacaagagacgttctttggtcacattattcttaccgatagatttcaagaatgtcaatgcataatttccattatcaacccggatcatatcgaaccagcgatgtccctcaaaagcaagttccatccgacgttcgtgaataatcttttctctcatttcggtctgcgtcagagtggtcggcaaccctgtcagtccggcacgcttacgaacgatattcaatggttcggcagcctgatccggatgtccctgctcattcaaggcttccgctttcttcagtaagacatccgcataacggtatactacaaaattgttggggttggtattatactccggagagacagttttcgacacaaggaacttacgtacgttataacccgtattcgaccaggaacgtctgtattccataccgtcaaaagcaggacagccctgatacaacacagtgatgtctttccgtaaatcaccgtcctcgtattgcttgacaaactcttccgtaggcagattccatccataagcaccggctaccatacccgaattacgaggccccatgaaggtagacagccaggatgcttgattatcgccgccccagaagtcatattccgtactaccggagtattgcacttcgaagagagattccgcaccattattgatcgtcgcattaaagttatcagcataattgcattgagtcagatcatatcccattgcagcaatgttattgcacaaggtcactacttcattataatagtcgcgatggttgggagccagtgtcaggtaaatatccgccagcatcgccattgcagcctctttgcaggcacgtcccctgtcagcatctccataactgcttttcggaggaagcatattcactgcatttttgcagtcggaaagaatttgagcatatacctcatctaccgtattacgggcaatatccgcagattctcccggttcaaacggctccaagcgcaaaggcacccctccgtacaaacgaaccagaatataataataatgtgcacgcaggaaataagcttcacccatgcaacgggtctttatctcattggagacagatgctgaaggcaaattggaaagcacgatgttgcaacgtccgatccctacccacggagaacgccatacatacaaggcaaagccgttatcgctttgggcaatgaaattggaagcctgaacagtttccaaaccgtcagtacctcctccggctcctacttcactgttgcctgcgatgatgtcgaggctccaaatacgttggttgtacatattcgacgattgcaaggtcttatagcaggcagtagtcagtgccacagcaatctcgttcgtcacttccgactcgggatcgacgccatatttaggatatttatccaagaaatcgttgcacgatgtcaatgccagcacggcagacataaataccaaagttattatctttttcatattctttctgctgatttaaaagttaaagttcaagcccatactgaaggtacgtgaaatcgggtaacggctgctgtcgatgccattaatatcaacttccgggtcaaagccggaatatccggtaatagttgccacattctcgcaagagaaagagatgcgggcattttccagttgaatcttttgcatccactttttaggcagtgtatacgaaagcgtgatattcttcagacggagataggaaccgttttccacaaatctgtcggatacacggcagttctggttcgggtctccccaaatggcgcggggcatagagttgctggttccttcacccgtccagcggttcaatacggctgtggtttggttgtaagcggctgccattccttcgttgtcaacattgttggcgttataaatcttgtttcccgatacgccttgcaggaaaacggagagttcccatcccttataagagaaattattgcttaaagagaagaaccagttcggattcgggttgccgataacggtacggtcttcatcgttgatgactccatcgttattcaagtcccggaaacgaatgtcccccggagctgctcccggttgggtggcgtggcggtttacttcctcccagttttggaaaagtccgtcggtcatgtatccgtagaatacattgatcggataaccggctctaagcatagtcacgtatgagttacccatctgattgataaacatcggagtttcgctgttcaggtccagaatttcattcttgttataggtagccgttaaagcagattcccaagagaaaagacctttcaggttgatggtgcgcagggtcatttccactcctttgttgcgcattttgccggcattggtaaaggtttcagtagtatcttcaaaaccggaggtgatagggatggaagctttcaccaacatgtctgccgtcttcttgatgtaggcatccagcgaaaggttgacacgtgaattgaacaggctcatatccacaccgaagttggtctggcgtacctcttcccaatgaatattcggattggaaagggtggtagataccaaagcggtggagttgttgttgccgaaaggatagactcctgtattataggaagccacaaagccgtagttaccgatttcctgattaccggtcacaccgtatccgatacgcagtttgaggtcattcaccggagaattgtctttcggaaaccattcttcctgcgaaatacgccatgccagagaaacggaagggaatgttccccaacggttgttcttaccgaagcgggaggaaccgtcacggcgcacagtggctgtaagcaggtatttatcttcgtaagaatagttgagacgtgccatcagagaaagcagtgcccagtcgctctggctgccaccgatactgtacatcttctcgccgttgtccatttcatggatattatcaaacatgaagatattcttttgagcattcaggtaatcatagttgttccactgggcggaagaacctgccatcacacctacacgatgtttttgggcgaaagtatggtcgaatacaaaataattatcccacaggtaggtaaatgatttgttgtcactcttatagcgggaagattcttctaccggattcggtttccagtcgtaagccggagtaaagttgttgacaaaccagaatttggcgtcataaccgaaggtgcttttcaacttcaaccatttggtaaaggcaatctctccggtgatgtttgccagaaagttatatccttttgtctcgttcgtcatcatatataacgtaccgatcggattgcggacacttccataccattgcgcttcctgtccgggaccgctccagctaccgtcttcattcttcaccggctgggtgggaagtgctttcatcgcatctccgatgctatagcttcctccttctttcacgtccgtactgaatgtcaggttagtagtgaacttcaaccatttattaacctgggcatcactatttgcctggaaattgaaacgacggtaattaacgctttccacgataccggactggtcgaggaaaccgccggatacatagtaatgtgccttttccgtaccaccggaatagctaaccgaatagctttgtttcactcccgtacgtagcatctcatccagccagttcgttcctgttcccaataaagaagggtctgcccaataagggtttgtattatcatcattattagacagcatatcattgctcaaggcggcatattgcgcagcattcagcatatcgggcactttagtagcgttctgaatagcccagtttgcgtttaccgttacttttccggcaccctcagcaccacgtttgctggtaatcatcaccacaccgttggcaccacgggaaccatagatagctgttgccgaagcatccttcaatacgtctacccgttccacatcagccatattcaaagaagacaatcccaagtcggtaggaattccgtcaatgacaatcagcgggttactgttgttgatcgtacccaaaccgcgaattttaatagtgacattatcacccggcttaccggcatcgattatctgcacgccggatacttttccctgcattgcctgaccgatattagctaccggagagtctttgatgtccttcactccgacagaagatacggcaccagtcaaatcgctctttttcattgttccgtaacctaccactactacttcgtccaatacttccgtatcttcctgcaaggttactttcaacgagtttttcccgttcaccggaacagtctgcgttttatagccgacaaaagagatagtcagcgtgctgttagccggaacgcttaatgagaaattaccgtctacatcggttatcgtaccattcgttgtacgtccttccaccacactggcaccgatcaccggttcacccgtggcatctactacatgtccttttattgaaatctgttgtgcgaatgcactaagagataggaacaagccccacattattaataagaggcggcgttcaaagcctttcgacttcatactctgtttcatgtacattaatttaaagttaatattagggttacttttgttttcgttctctgtgtcattgctgaaatgaccgtgaaacaaaagtatccacatttcatactgcttctttgagcagatagcaaaaatatagtgatttatacagtatctcacagcataaaccactaaatataagaacgttataaaatagaagtcagactaaaaaagtagtgattttcttattcttccaccttccctatttgcattactttagtctcaaattcatctctttctcccaaagctttgttacggacacgggtccggtaattataaatagtagtcacggaataacggaggaattgcgctatcttggtactgtccgtaatccccagccggataagggcaaagatacggagttcggtgttcaacagttctcccggtttgggttgcatgggttctgtgagcagcgcattaaattcctccacaaaattggggaagagttgcaggaaagtcatgtcgaaatttgcataaaactctttcagttcttcgtcaagaaattgagaagatttaatggctttatatagttcttccactcttccggcagcagcaattttatttagggaacgacggtataaatccatcttgtcgagataagtggagcattggtccatatatcggccgatatattcctccttgatatagttggcttccgaaagcgtatggttcatctctttcagttgcgagttggagtcgtgaagttcttcgttcagttcttgcaacaacgtattggtatcgaccacttcgcgacgtgcggcagcaacctttttcatctgcttgtaaacgaagaaaatggcaaccaacaaaaatacggaaagcaaactgatacaaatcaatgatactttcatctcctgttgctgccgtttggttttcaattggtaagcctggtcaatgataggaaagacttgcgagatttctaacgtacgaaggcgggcattacaaagagtggcatcctctaaggagcatttcaggtaattgtaggcacggtcaatatccccttcatcgtagacaagagaagcgagtttgcgcaaagatacatattcctttactgccgatttcaggtcggcaatggccgaaagggccaggtaatgcttttgtccttgtttgtcgcctttcaaccggtaaccctcggagagagtataagtaagcattgcttttgaatggtcatccaaagaaggtttgttgtaatattccatcagcatacggatggcttcatcgtattgagcatgtacaatgcacttatccgccatcaccaatacgtgtcccaaagagtcggaagcgttgacctgcagaagagagtcacgatacagatccgtcattcgataatactctttcttgactttctccgtaacggcataatctcccatcaatccgtaaatagtgcgatacaagtgataatagtaaccatagagataatcgggcagcgttttcttatcaatctgccccaatagttccaacgcttctttatacatcccggtagttcccatcacttccgccatattcatggcagcatcatccagataatccagtttatccatgcgatgcgccagttcctctttccgttgagcatagacaaaagacgaatccagattataagcccggtattcatcgaaaagacgtccgcaaaaaccatatcgttgttcatcggaagtagcctccgccaacaatttcttcaggtcagcgatacgtgcctccttttccgctccataggtctgacggtttttaatgataccatcaatctcatgaagtaacgcatcggtactcttattatcttttgcataaagcagaccggaaaggacaattgtcacaaaaatcagaatcacttttttcatagtgccgtatgtattatagttgcaaagataaaagtctttcagaaacttccggctttcaggagaaaattattgcagacggaatgaacaatcttgtattaaaacaggaagcattacaaatttattatgaacataattattatatttataataattttatcgttggaacaaccatcaatatacagataaattcaaaagtatgtattcacagcaaattcaaactgttctataaatattttcttaaatggatatatattattttgttcatagaaaactaacatagctttcttatagtcgatagaatcaactgaacgaaatgataaaggacaataaccgttggctataagtattgcattacttgttatacgcgcagtacgtttattaccatcagcaaatggctgaatgtaagataacagaactaaagctaggaaagctttatcaaagatactctgcttattattaattaattgacaagtgtcttccatagcttctcttatttgatattcattatcaagtggacgataattcgtacccgtaataccaacacgccgagaacgaatatgacgctcaactcccagttctttaataaggatactatgaatgtcttcaatctttcttattgataaatactgaagataatcaggattatctaaaataaaatcaagagcttccttgtgatttagtagcataatggcttcttctttagttttaccttttgcttcttctttttccagcaaaagtctttccgtttcaagaagattatatgtgttcccttcaatttgagaagacttccaactaagatccacacctaacctttccatttctttccggtactctccgtctgtcatttctaatacatttcttctaaacgtttcttgaagagccgttaaatgtttccgttcgtccatcgtgaaagggtcaacattaggcaatatatcaggaataaggctgaaattgaaagcttgttgaatttcacgctcatcaacttctttccgaaagtatgattctaagtcgaaataacttgtaacaaacgtttgtggtgttagtttataacatgtggcaggtccttgccctatgacttcaatacttccagcggaaatcatggcagctaataaacgcttgaatgtggcgacacttactttagtattcactccctccattaattctgacctagaagatagaggatgaaaacgaagatattgttgaatttcttcttccattgctatttagttgattatatcggctcaaaaatacataatattattaatatatcggctcaaaatgagccaataattacagtgtatagaactcttttgagccgatatgaaaatcttcagctacctgttagtagtctcatattgtttctgcattgctttgatctattcttcagaattcttatttatcacagcaattttatcctgtaattccttattctggatttcagataatctcatctgttcagtatggatcttctgactgtcctctgtggtgaaatagttcatttacgtacgggtttggctcattctctgtacggttttgaataaaataatggagtattctggaaacgttgtggtaaatctgaaaaagatgattgagtttttaagattccccgttatctttttattataagatatgggtccagggtgaggggtggtgagggtagatatataaccttttattttattattttctatattatctccttttttatcctcaaaaaaaaatacgaaagttataaatctaccctcaccacccctcaccctggacccattcattagcgcaccgtttaactcgtttctatgcactaatgaggtaaatacagttttttgaaacgctatccaatagaatgattatatttgcattttgatataagaaacaaattacaaactattaatcagtaaaccatgagattcagcaacgtaagattattagtgaaagacttcgccaaatgcttcaagttctacaccgaacaactcggattagagccatcctggggagatgaaaatagcggatatgccaattttaaagtagctgacgggatagaaggcttcaccctttttgtatccgactggatggcacctgcggtaggcaatgcagataagcaacagcccgttgcgatgcgtgagaaattaatggtttcattcagtgtagataacctcgacgaaacttttgccgatctaaaagcaaaaggcgtgacgtttatcaccgaacctacggatatgcccgattgggggatgcgtaccctatacctgcgcgatcccgaagaaaacctgatagaactctttacccctctagcaccggagcaatgtagccaggagctcctcgaagaagataagaaatttcaataagaaagtttgttataaagaaatgtgcccatacgagtgagccggaaaaatgatagttaatgagccctatagtgacatcgctatggggctcatacattaacttgatattgcagatattcacttgcctttcaactttatagcaagaaactcacaaagtagaatatgaatctgattaataagccctcaacccataatcgaatctcatcttcttgctatctttcacttcgattttcaacaaattacttccttttcgcaagtaacggctgtaatcgctgatattgtattgattatattgcctggtctgctttgcctcctgcgcaaagacttctactccattcagccatactttggcttctccggcaacattcagccatagagacagatgattgaaatccttatccaccttaaaagtagcttctgatactaccgtagaacgagggggacagtcgaaaggcaaagaagtcattttcagctcctgaccgttcagactgacaaggcgggtattcttgcttccattctgaccgtctgcaatcaaagtaacagctttcgcaggggtgatttcatacaaacggttgtgcatcaggtgtaacaagccttccggtattttagttactttccggtcgtaagtaatcaggccgttcacttctccttccacatcagtggtttgtgtataaacagccgcactcaacccttgggcaatcagcgtttccaaatcatataccagacggccgtaactatcaatcagagccattgctccgtctatattcttatacccccagttcctcatattcggattccagatatgttccttgatcgcccagccatagccgccgaattctcccagtacggaaatgcggttgccgttgttctccggcagaatcatggaagtgacaggataattatgtacgtcgtacatatcgcctacgcctctgtccgtccagccggtcactccgtttatcaggcgtgtatcgtcgtattttatcactttatttacgatttccaccgtgttatgctgtccccatccttcattgaaaaccacccaggtagtgatacagggatagaaacggagacggtcgatcatctcgaacatttctttttgccattggcgggtgtgttcttcgggggcgttccaatcagtagtagccaacggattgacgtgttcctccttcttccttgacgtagcaaaaccggaaaccatgtcttgccacatcatcaatcccagagaatcggcgtaataataatattgctccggttctactttgatatgtttacggatcatattgaatcccatcttcttcaactgcaccatgtcccacaacatcgcttcctcggaaggaggagtcaacaatccgtcgggccaccagccttgatccagcggaccgtattggaagatgggttggttattcaggcaaatacggttgtatccacattcatctttacgggcatctacttttctcaaggcaaagtaactctttacccggtctaaaacacgtcctccattggataagacaatattcaaatgatacagtttcggagattcgggagaccataagacagcgttcggaacgtctatctccatcgcattagtcaacttctgttccaccgtcttgattactttgccatcatccaacacttctattttcacttcttcattgcctttggctccggctatatcgaaagccagcttcacggattttctctcaatatcagtggaaggaagtacctgacgaatataggttttattcaccgcttccagccacacagtttgccaaatgcccgatacaggcgtgtaccagataccttcctgattaagttgttgtttccctcgggaaatagattccgtgtccgtcgggtcggtgacggctacttcaatgttttgggggccactcttcttcaggtatttagtaatatcgaacgagaacgggttgtttcctcctttatgcgtaccgaccaaccggttattcacccatacttgacattcataatccactgctccgaaatgcagaatagcagatttattcttccaggaaggatctaaagtgaactcacgttgataccataatttatccgtaggaagaaatgttttttgcactccggacagagatgattcaatcgcaaacgggaccaggatttccccttcaaaggaaacattcttccggggcgtgttctgatccgttacggcatacttccacaatccattcagattgatccattcggcccgttgcaactgcggtctgggataactttgccacacattttccggcgtcacctgttcagcccatactgttttgattttatcacctttaggctcccatgcatgggcaaacacctgcgacatggctcctaaagccagagtaaataagattcttttatccataagcattagcgggttttatattctttaaaatctttccgtcgattcttattgtaggtattccacattttctggaaatacagtacatcactcttgtccgcccattcgaaataggctgtttccaattcttttgccatttcaggatatttaccgatcaggttgtgctgttcggtacggtcttccttgatgttgtacaattcccattcatctcctttgaagttggcggaaaccagcttccaatcacctttacgcaccatgcggttgccttcatgttccgcatagatgtatctttcgggcatcttctttcctttcacaatcggaaggatagactgacctgccgtaggcagaatcgctcttccctgatattctttcggataagtggctcccgccagttccacacaggtagacatgatatcggagaattgtgcaggctgatgattcagtccgcctttgttcttcacatgattaccccaggaaataatacacggcgtggaaatacctccttcatgtgcataatgtttatagaacgtgaacggcgtgcagcaaacatttgcccagcctgtaccgtaatgatgataggttccgggcaaacccatttggtcgagttcttctccggtatgggtatggtattcgactccggtctgtttgtcaaagccaaattcgtgccattcggcacaagctccgttatcggacataaacatgataaacgtattgtccaactcaccattcttctttaattcatctaccacccggccgatgttcgtgtccatcacatctaccatagcggcaaaaatagacatacgtcgtgcgaggtcggtctgctgatctttcgtcaatgagtcccatgccggtagcggatgcgtttcatcttcaaacagactttcgggaaccacaccgcgcggactaagttccggtttgccttgcatgagtttcaggtcaacaatccgtttccagcgagcgtcacgaatcttgtcccatccctgcatatagagagacatgtatttatcggtcacttctttcggtgcgtgcaaagggaaatgaggagcgttataagccagatacaggaataacggtttcttctcctgatgtgcctggtcgataaagtcaatcgcataatccgttatcacattggtagcgtagaaagttccttcctcataatgtctgggggtacggtctttcggcaaacgagtatatactgccggattccagaaagaattaaatccgcccaacaaaccgtaatactcctggaaaccacgaagaatgggattcgacttattccctagatgccactttcctgacatagccgtaaaatatccggcatctttcaggacttctgcaatcgtgacgttgtccgaattggaacgaaaaccggaatatcctttcggccaggcaggatgactgccgtccatgtgtcccaatcccgtctgatggggataaagtcccgtcaacaggttggcacgcgacgggcaactgcgtgcactgttatacatctgcgtcatacggacgccattctttgccagtttatccaacaccggtgtatgaatctcaccaccgaaacagccgagatcggagaagcccaaatcgtctgccagtatgataataatattcggtttgtcctgcgcatacgtcatcggaaccagagccaggctgcctgctatcaataaagaagttttcatttggtattataattaaagttgggtttgaatttaccattctcatagatcatcggaattaatccgggacggcacgtcactttatactctgccgcctgtgccccacgcggattgaagaacatggtagcccaccagtttccatccttatcctggaaaaggttgttgtgtcctcctcccgtgatggcattgtagcgttcgctatagggaccatacacattatcggctgtcgagatgatgcagtcgtaactataacgtgtcttcggtgaggttactccctttttctcaatataggtatctccctccgacgtacggtgcgaccatatagcttgtacgaggtgatatttgttatcgtatttgaagataaacgctccttcaatatatggttccggattatattttttctctttcaatgttttcagttcctcggcaaatccgctcatatccggtttcatacgggcgatataatggttgtgcccgacaaagtagacagtgccgtccgtatcttcgaacaaacttccgtcgatgttcgggaagatagctttatctttattaccttcgatattctcgtacggtccttccggctttccggtcttgctccgcaaaatgaaagaacctctcccacctgccgactcattcatgcaggcaacgataaaccagttcttcacacttttgatataatgcatttccggagcccatacagcatggaaacggttgtccatcggatcaccgtttatggattttttctgatatttctctcctgctttatatactttcggcttcttttgccaggttccgtctttttccatcgaccatatttgtcctctggcttcccaatacttcatatctttggaacgccacaggtacaaaccgtcgttccagtcccagcaatgtctctgtcccggaaagtaacggtcgggggtagaggtcgttcctgtgatataataataaccgtcgggacccagcgtagcccaagtgtccctcatccaataatcaaatgccggctttacagatgtcggaacacgtagttccggagcgtttgtatctgccgttccatataactgtgctgatgctgtagagatggaaataaatcctgtaagcaagatcaatcctaatcgtccaatcaatttcatatattcctgttttatgtttacgtattcttcctatttaagatagttaaatggattctgtttaaaatgatagcgtctttgcggaagaggtagtgggtcctgcaaacgtaattcccatgccagcaaccgggtcagaagttccgtttgaatttcgctatatttcttctcaccaaacagattatgaacttccgaagggtctttcttcaagttataaagttcaccgtttccataatgattcattaccagtttccagtcatcctttcttatcatgcgtgaagtgccactttgtgtccaggtgttcagttcgtcaaagtgggctattttgccgggagtcaatgctccttcctgttcgaaagtcagggaagcgtccagtccgacgtcagctccaccgaagccttgttgaaccaccatgctggagaattcttctttgggataagccttcccggtcaacatcggccacaagctacgtccctgaacgcctgccggtatttcggcaccgatggcagagcagaatgtagggaaaaggtcggctatcgacacgtggccatccataggtgcaggctgattcttgatctgatagcccgcccataccatcggaatacgtgccaggctttcggaaagtccggctcctttacggattaatccgtattctccccaataatcaccgtggtcggagagtacaacaaagatggtattttcatattgtccgctggctttcaatgattcgatcaatcttttgatctgatcgtctatcaaccggatcattccgatatagttggcacggattcggggcaggtcctgttccaggttggggcaggatgcatcttccagttctgccagaatacggtatttctctcctttctttgccaagtccttgcgtgatgtcttcaatacgggaagtttgtcgggcgagaacatggagtaatagggttcgcatacctgataagggttgtggggttccggaaaggatacccatacgaagaaaggattttctttctgtttctcaatccatgccagtgcttcgttcacgattttggtgggatgctgctcttccaggaagattggagagggttccagccattggcctctggcttgctgattcaggaaacgggcagtttctttctcggcgggagtcgcctttttgttctttccccagtgtccgtattcagaccaaaagtccaagtcggcaggtttcaggtaagcatgattcttgcccaccaatgctgtctgatatccgttttctttcaatactcctaccaaatcctgttgatagaagatgtcgggaatattgtggttcgtacgtacgtgagtggcagaagggaaacgtccggtgaacatggaacaacgagccggagaactggccggcatcacagtatatgccttgttgaaccatacattctcctgtgccagttggtctacataaggagtcacttccaaaggaaaaccctccctgccgcacaagtcggcacgttgctggtcggtcataatgaccacaatattcggtttgccggtttgtgccgcggctgacatagccaacccctgtatggcaagtcctgtaatacaaaagagtgtatttttcatttttgcttcttttaatttcctatttatgtaaacctcatattcttttgtttaaatctcttatatccgcttattgaatcttatggttctcctatttaaaacggtacacagtcatagaagcggcctccagttcgagcggtttgttcaggtccagtccgacttcggtctccaccggttcgacttcattcggagtagccggtgtgttttcttttcccggaaccagtaccaggcttgtcttatgagccttgaccggacgtttgaaaccggagacttccggctgcaaggtgactttcttatcctgcaggtttatcagtttcaggatatattgcttactgcccgtatcatatcccattgttacaaagatattctgcataccttccatatctttaatcgctgcatccaggcacacatcaaacgtgtgatccctgaacatcttcgccagatagaagaaagaagtctttacgctactgtccactccgttaatcaacatcggcaggaaaatacggtgttccaggaaatcccaatgcctcatcaccggacgttcggcaaacagaggattcaaatcgccgttacgctctattgacatacggattgccccggtagccagcaagttataaggatattttccgctgattcccaattcgccgataaataaatcggcaacaccccgtttgtaattatcaaagcgataatgctgttcgcaagcccattcaatcgagttataataatgttcatcgaacactttgacattcttcgggttgacaaaattgggaatatctttccgtttgtcgtcattctccctccccactacccggataacgctattagcgatataaatcaaatcgggatatttagtggacaatgcctgatagatcttttcataacgttcccaatatacaggtccgaaatcttcatttccaatctcgatatattttaatgggaaaggggcgggatgaccgttctttgcacgttcggctccccacttcgtagtcgtatcgccaatagcatactctatggcatccaacgcatcctgaatatacgcatccaaatcgacgtcaatatgcctgaagttccattgcggactttgctttacccaaccgctgcaaatcatgcccgtaggcatgacatacatcgcatcagcccccacatattcgcacaattcataaaactcatgataaccgattccgtccgtacggtaataaggcgcccatttactccactgtcccggacggttttcgatcggtccgagcgtcttcttccagtggtacatcgtttcttcattgactccgtgtacgatgcatccgcccggaaaacgaatgaaactgggagcaaactctttcagattttgaacaatatctttacggaatacggatttcccctcattccaggtatcagagggaaacagggaaacgacatctatctgaaattgtcctttcgacataggctgaatagcaagcattccgcgctggacgttcttttccggtttcagttcgcccgtatattttgtccagtcccgattctctatattcacttcgatcacattgctcacccgctgtcccagttcgtcaactagaaatacacgcaacggggcggaataattcctgcttttcagaaacaaggaaaggcgataagacgtatctgttttcagattcattccataatatccacggttgagaatcagagcatccgggtgattcgcaatatcttccgtaacattcaccagcatcgaatacttattttccttgctcatcggattttcctccgtgcgactgataaatacaggagtataagatagcggataagtcgcccatccaatcagcggatcggcctgaaatactttcttctctttaacacggggagccggaacattttcatacagcccgttctttactgataatccggcaggcggtgtagcttcttcaaacgagcggttacggatcagttcagcgtgtagagcaccctcgcccatcattcctatttcctcataatggaaaccgtactttacgggagccactttacgggttttcgatttattgatatacaatgttccatcggataaagacggaaaagaactattcgcatataccagaggtaatgtgaaaaacagaccgatacccaacgtaagggattttaatgtcggatgattcatagcattgtgtttttagagtttcacattgcaaatgtggtcttttctatccaagaaaaacagaaaaataatgcttaatacctgcaatcatgtataaaaatcagctgccggacagcaaactgaacatgagtgctgtccgtttgaacaattctacgactgttccaaacaaaaaaagacgtatctttggtcatgaaattaaatccgtaaagccatgagaaccactgcccttaaaatcgtcctctcctttagtctcgtgctcttaaacgccagcctgtcgacaggacagatacaatataataatatacgcttcaaacaactaagcatagccgaaggactcccgcataatactatcaatgcgattacccaagacaatcacggattcatctggttcggcacacgcaacggcttgtgccgcttcgacggttataatattaacctgtttgcacacaatgaggccgacagcacctcgctctgccacgactttatcacccgtctgtataacgattcactccgcaacgttctatggatctccaccgatcagggtatctgcagctacgactaccggacggaagattttacccgttaccggattaaaggaaataccaaagatgatgtttgtttcctgaacaccagtgacgggatgctcttggcggcctgtagtaacggactctaccactacaatgaacaggacagcctgttcgttcctttccttctcaatgaagagaaaccgcatgtgagatattttgcagaagacggagataaaaccctatggattgacaccaacaaaggactgatgcgatacagtctggagaagaaacagttcgtttcgctccctaccctaatccagccttttgcacagcaatgtaacaatgccgtgttgatctcgtccaaccagcttttattcaataccaataatgatttcttcgtttaccatatacaaagcaatactctgtgcaatctctccaaagatctggaagtaaaagatttccggtgtgcgtcaaccgaccataccgggaatatatgggtaggaacggagtatggcatcttcgtgttcaacaaactctaccaactgattgcacactacgaacaatccgaacgggatttaagtgccctgaacgattcgcccatttacagtctttatcaggataaggcccacaacatgtgggtgggaacctatttcggaggggtcaactattatatattcggctccgaccagttccggatatatccatacggaggcagtttcaatcatttgagcggaaaagcagtccgccagattatcaatgcgccggacaacggattgtacatcgctacggaggatggcggattgaattacctgaacagtaaaaaagagattacccgcgccgaacggcttcacaaacagatgcaaatctacgccaagaacatacactctctatggctcgacaaagataacagcctatggctcggactgttcctgaaaggagctcttcactatataccgcatctgaaccgtacggtggactataatctattgtcggaagaggtttcgtccggcttctgcatcatcgaagacaagaacgaccacgtttggtacggaggcccttctggcttattcctgatcgacaagaaaaaagccaatgcccgtccggaaaagatttcaccgctccgtattttcaacctggtacaattcaatgacagcatactttgggcaggaacccggaaaggcagtatgttccagataaatacccgtacgctgaaagttacctcactccctatcttgccgcacaccgatctctatgtaacctatatctaccctgattcacaccaacggatatggatagggacagacaacaacgggctttatgtatcagaccgcaacggaagcatcatcgcttcttacagcaaagagcagctgggctcgaatgccattaaaggcatcatagaagatgaaatgaacaacatctgggtaggaaccggaagcgggctctgctgcatcaatccacagacggaaaatatcgaccgttataccacagccgacggactgccgattaaccagttcaactactcctccgcctgtaagaagcccgacggagagctgtatttcggaaccatcaacggcatgatttctttttatccggaacaggtacgctccgtcaatcctcatttcaacattgccctgactgctatatggagcaacagcgaatatatgtcgcccaacaacgagaaagcgtccattccttcctccatctccgaactgacagagattaccctgacacacgaccaggcccaatccctgcgtctcgaatattccggactgaattatcaatatacctacaacactcaatatgccatgaaaatggaaggtatcgacaaggactggcagtttgtgggcaaccagcatcaggtacgcttttcaaacctgccttcaggaaggtatattttaaagatcaaagccagcaaagacggtattcactgggacgaaacgggacaaaaggaccttgccatcagaatcctcccaccctggtggctatcaccgggagcgtattttgtatatgcattgctctccttattaatcatctacgccgcctaccgatataccaaaacgcgtattatcctgctcatgcgactgaaaacggaacatgaacagcgtgtcaacatggagaacatgaatcaacagaaaataaatttcttcacatacatctcccatgatctgaaaacaccattaaccctgattttatcacctctacaacgattgatccagcagccgcagattagtaacaacgacaaggagaaactggaagttatctaccgcaacgccaaccggatgaattatctgattaacgaactattgacattcagtaaaatcgaaatgaaacagatgcatatcagcgtccgtaaaggagatatcatgcactttctggaggaactctcccatatcttcgacatcgtagccggagaacgggaaatcgactttatcgtcagtctggaagataccaaagaggaagtctggttctcgccttccaaactggaacggattctttataatttgctctcgaacgcatttaaatacacacaacccggcggatacgtcagattgagcgccaaactgattaaagaggagaaagaaaccatggttcaaatctccgtcaaggacagcggcagaggaattcccaaagacgttcaggaacaaatattcgagagctactaccaggtcgaaaaacgcgaccaccgcgagggattcggcttgggactttcgctcacccgttcgctcatccacatgcataaaggagaaatacgggtagagagcgaggtcaacaaaggttcggactttatcgtcaccctgaacgtatcggaggatgcctacgcacccgacgaacgctcttccgaaaacatcacgacagaagaaatacaaaaatacaaccagcgaatcaaagagacaatcgaactcatccccgaaaagctgaccaacaaagagaaagactccggcagagaatctatcatgattgtggaggataataaagagatgaatgattacctcgccagtatattcggtgagaaatatgacatcatacgtgcctacaacggagcggaagcctgcaagaagatagccagacaactgccgaatctgattatatcggacttaatgatgccggtgatggacggactggaattcacggaacgcgtcaagcaagatgtaacgaccagccatatccccgttatcctcctgactgccaaaacagatgagaacgaccatacagaaggctatctgcggggagcggacgcctatatcaccaaacctttcaacgccaagaacctggagttgctggtacagaatatccaaaagagccggaaacagaatatcgagcacttcaaacaggcggaagaactgaacatcaagcaaatcaccaacaatccacgggatgaggtatttatgaaagaactggtagaacagattatggcgaacctcaccaaggaagattttggagtaactgaaatcacagcccatctccgcatcagccgtagtctgctgcacatgaaactgaaatcactcacgggatgctccatcacacagtttatacggaccatcaagatgaaggaagccaaaacccatttactgaatggcatgaatgtttccgaagcctcattcgctgtcggtatatcagacccgaattactttacaaaatgtttcaaaaaggaatttaatatcactccgacagagtttctcaagcaattgaagtaattcgccggaactggcacttgtaaatctccttatactctacaaagtttgaaaaagaatacgtaactttgtagtaattatgagtgaaagtcagaatattgaatataaggaatcgtggagagacgaatatctaaagtggatttgtggttttgcaaatgcacaaggtggacgtatctatatcggtatagacgataaccaacaagtggttggtgtagcagacaccaaacgactgatggaagacattcctaataagattgttaactatctgggcattgtagctgatgtaaatcttttgcataaagaggataaagactacatcgagattgccgtgcaaccgtgtaatttgcctatcgcttatcacggtatatatcattatcgtagcggttctaccaaacaggagttgaaaggtgcagccttgcaacagtttttgcttcgcaaaatggggcattcgtgggatgatattgaaaacgaaagagctacattggatgacatcgaccgccaagctattgatttctttttgcgtaaagccgtcgatgccggacgtatgcctgtagattcattgaatgaaactacggaaaaagtactctctaatctgaatcttatcggtggggaaggtaagttgcgcaatgctgctttacttctattcggcaaaaatcctgcaaagtttttcaccagtgtgcaatttcgtattgggaggtttggtcgtgatgaagccgacctgatgtttcaagatgtagtagatggaaatatcattcagatgaccgatcgcgtgatagaagtattgaaatccaagtatctcatttcacctgtccattatgaaggattgcagcgtattgaacctttagaaattccagaagatgcattgcgggagagtttattcaatagtattgtgcataagttgtacacgggagtacatatacaaatgaaagtgtataatgaccgcatccgtctttggaatccggggacacttcccgaaggtatgactatcgaacaattattaggtgaccacgcttcacaaccccggaatcgccttatcgccgaaactttttaccgtgctggatttattgaatcatggggacgaggtattcataaaatttatgagggtatgacgaaagcagggctccgcaaaccggagtttataaatgaagccggtggcgttacacttatcatatatagacccaacataattaagaacgatgaccctttaaatgaccctttaaatgaccctttaaatgaccctttaaaactatcatcattagaaaaagatatattaaaattgatagtaaaagataatcagtcaacatatgataatctagccatatctttatctgtttccagtgctacgatcaagagagcatttcgcaacttaaaagtgaatggctgcattattcgaaaaggctcgaaaaagataggttattggatgataacagaaaaaggaaaatctattctaaagtagatcgtaagctaatttaagcgatataaacctaacagaatgtctaaaaacatcaccggtaatcagcctgcaacatcgttgattcagctaattaccggcgacagatagacacctataatcgactaatacctattctaccattcctggaagcgtaaatcagcttccggattctgacgacgaatcagttcctcgtcaacctgataagtgacgccacctttcgtgtacttataagaaagggtaaacttaggctgtttccctacaaattccaatgattcggctgcaggatctaatgtggcggatgcatccgtgatagcgacacttcctccggcttcaatattgacgcttccatccggattgactgtcagattcaccgactcattgttttccaatgtgtttccgaaacccggtctgcgtactttgtttctacctaacgaaacaaagtcacgggtcatattctgactcaaatccttgttactatattcagtaacctgctgggtagacaaattggtaacttttcctttcacaaagtaggtaccatgatactggctgacaaatttgacaactacaatactgtaatccttcaaattgccattcacatcagtactaatttcatcctgattatgatcgaccaaccggaaagggattgcatagtgcttgttcaaagcagcattgtcttcatagaaagcatcggagaaagtcactttcacatctgctattgccagattcggattgctaattgtcatcttgttcggattagccaactgataatagttttccggcatcagtgtcaagcccgtaccatccagtaaagacggatcgatctcaaacgtagcccaatcatcggtatgcacctctcttttaccgccaatagccactcctacctttatcgacatatctgtatcggctaccagtgtccgcagaggtttttgcgaagcaaagtacacagaactcttatcgtagtccttttcataatcgtcataacaagcagtcatcagaacgcttatcagccctatccataatatatttagtcttttcattgtaaataagtatttatatcaacagcacgttattcccaaccctgattattcattagattcttattcttttccagctctgcatacggtaatggcatgaaatagtttttcacttcatatttccgttgttccactttctgtactttgaagctgaatgtgccatcttcattgcgggtaacggcaacaccctccacctcttcgttcaacggtaatacccaacgacgcatatcaaaataacgatgattctcgaaagtaaattccaagcgacgttcgttctgaatcagctttctgaacgagtccttactttgagccatttcatccagataaagatcaaaattgatacccccggcttgcgaacggattgttttcaatatttcgtatgcagaatacagacatccttcggctttcactgtcgggttgccccaagcctcattggcagcttcggcaaagttaagaagaacttccgatttccgtaacaaaggattgtaatgaaccgagtttaaggtctgaatcggattcagcatagccgatttcttggaaacgaatttagccaggtaataacccgtacgtgtagcattctcactaaacgaaggagaatcttttccaccctcggacatatccaacggctgaccggaatcgccaaatgtagcactatgatagtagacattcagtgcaaagcgattatccagtacggcataaagctgcgtcagatcgaaatcaggatcagacagatcgacaccggaacggacatcggttgccggataaccattcttcgcataaaaagcctttaccagattatgagaaggagtggcacgggcacttccgtagtagaatggcgggaaatggtaaccttccaataggttattattaaaatatctgcggaaagcataatcggaactttccgtctgaacatcggcaatggacgaagccgtaacaggaacataagttccgaaaccttccatgcccagaattttattgatctctttggctaccgcttcccattttgcctgataaaccgtagggttcagtatttcgaattgtcccatgccagtgatcttcgtcacatcatcatcctgcatggcagggcttgcgctatataaaagcgcacgacttttcagaacagctgccgccgctttcgtggcacgaccgatttgtgtattaccaaactccaggtcatctccctgatacacattcggtaataactcgatggcattatccaaatcgttaacgataaaatcgactgttgcctgataagtaggacgaagaaattcaccattctgcgcggcctcatcctgcgaaataaaatgatctgccaacggaatacccaacgcttttccattcttcgcctttccgccgtacatcttcaatagctcaaaatgccaccatgcacgcaggaaatacgattcaccttccagacgcagcttgatttgcttgtccacttccgggtcggtacggttgtactgcacctggtcggtcaagccgttttcgaggaaagagtttacatagttcagcatgttgtacgcattgctccaatttccgatcgggttgttaaacgctgtcatcccacccatatttaatttatagacagaagagctgcgcagattagtcactgcattatcggtagcacaatccagaaagttatcttcaaaacaatccggacggttggctatgccattataagctttatatagtacgccttgagcaagttccggcactctccaggtatcagagtctccgatctgccatgtcacctttgtatccaatgtgtcgtcacaagcacaaaagagaaacagacctgctaaaacgcaacttcctaatatatgtttcatattgccatctattaattgttcaaaattaaaatacaaaagagactccgcctgtaaaagtacgtgtcaccgggtagtttgtcacaccggcattcagcaattcaggatccaaatctttcacggaagaaagcacaaacaagtttgcaccacgagcgaaaaccttcatcttcttcactaccgaacttggggagaactgattgaacgtgtagctcaattcaacattcttcatacggaagaagcttgtattcttcaaccagaaagaagaattgcggaaattgttctcaccggcagtggttgtcaggcgcggataacttccggtcggattgtttgccggatgataacgatctaatgccagtttagagtatttaccttctccattgttccaataataagcatttgttgcccaagtgtgaacgcccagttcggaatatccctgaagatacaatccccagcctttgtaacttacattgaaatcgatgcccaatgtagtacgtgggaatgagtttccgagttcctttacgtcacgaccgtcaatgatcttatcgccgttcaggtctttgtaggcgatgtcgccttcctgataatcggcaaacgtctggggggcatgtccgttgatggctacatctttgccaaataatccttcggcaaccagtcccatcatagcatcggtagaacgccccactgtataacggtattcttcaccatgtttcacctggttccatttcaatactttattctttgaccatacgaaattggctcctaccgaataagaccagtcgttgatacggtcgctccaggtgaacattccttctataccatgattcaagacggagcccatgttatcctggtaggtaaagttgccagtataatccccgtaagaggcatcaacagaaccaatgatgtccgtatgtttctcacggaaatagtttatttcggtatataagcggttgttcaggaacaggccctccacaccggtgttccattctgctgccttttcccatttcaggttcggattgcccgcacggacaaaagtggaatagtaagccgtagcaccgttgttcgttgttccgaaccggaagctgccgtcttgcgaccaggcacgttcatacaataaatgttcggtgcttctgtcatagcccaatataccggcactggttttcagtttcaggaagttcacgtattcattgtctttcaggaaatcttcattgcttagaatccaggcaagcccgcctgctgccgagaagaagtatttatttcccggtttgaaacggttgcttcccatcaatgccatatccgcttccacagcataacggcggtcatacatatagttcagacgcaatgcgtagtttgcattgatgatgtcctgggtcactccctgattggttgttttcgagtacatataagtcaggcgtgccgatacatcgtgtttttggttgaatgtattctcataaccggcaaaagcattccaacccaatgtctgttgcaaggtagtcgacttccggctttgtgaagtggctacatctgttttcttcatctgggtgtacataatttgttcctcaccggcaaagtcacgatatgttttgatagcatacgtcggatagactttgctcaaagagagttgcaggtaatcatagttgtcgaaagaaaggaaagcaccggctttcaatccttttgtcagcatatcaagatcaaatttcaaaccgatattggtctggctgcgtgtataacgctcatccgtatatcctccgtacatcgtttccgcgtatgcattcatcggacgaagcagacttgcgccaaacaaaggaattccgtccgagctggccagtccggtttcttccggtgacatagtcagcgggtattcattcggacgatgcgtagacaaggcagtaaatacctgaccacagtccaattgtccccatttacgcatttccatacgtccggcaacgtctgcggatatagtcaggaaatccgttacattaaaatcgaggtttccgcggagagtcaggcgatgtaactgcggagtataggtgacatcttcaaatccgctacctcctacatatccggcaatcagggcataacgcactctgtcagtaccacccgtcatatcgaacgatactttccgatagttggcatttttgttcaataactgatcgtacaaatcgacgttcggatacaatagatcattggctcctttggagtttttatatccttccagttgtttctgattatagtaaggagtcaatccgtcatttgcacgcgcttcattgtacagattagcatactgataagaattcagaaaatcaggagtacgcgtcatctgtaccacacctgcttcggcggttgcgttataaatgcggcggttggcctttcctctgcgggtagtcacccaaagtacgccattcgcagcacgcgccccataaagaatcttggcagtggcatctttcagcaactcgatacgttcgatttcttcaggaatcaaatccgctgccggacgttccacaccatcgatgataacaatagctgtattctccgacatgccatgctggccacggataaataaatcaggcgtattattacccaatccgctgactgtggagcgaacttgcagacctaacattttaccttgcagcatattagtcagcgtcaaatcagggaacgttccgaactgtccgttcttcagtacgctcgttgcgcctacttcattccctttatatgtcttgccaccatcggctctattcaccagcgattcttcggtcaggaacagaggctctttcttcaggacaatcttttcaggaacgatattgctgcctgtcagcttatacactttatcttcatatcccaaagcctccaccataacggttgcgtcattctcgaccttcgtctgaaaacgtccctttgcatctgtatatagaacgactgcgccttctccacaaatgatagaaacattcttcaacgggctacctttctcgtcggtaacaatagaaacgacttccaccaaaggcttcttcgccgactttctctttgatttattttgtgcgaaagtcaggctagagccaacgataaggacaaatatgagccctatcagtcttatatatctaatcttgtttctcatatacttttctttatttataggtatcaccatccggggttctgttgaagattatccaaagccgccacttcatccatcggcagcggataccaataattacgcttgttaaacgtccgcacggctgtcctcaccggaacatactcgtaagtaaagtcagtcagcttataagtgcaggctttttccactttcaactggtcggccgtataagaatggttgatcggagttgctttgacacccatgatcggatattcacccttaaacagttcttcagcaatcatccaacgacggatatcataccagcggtgtccttcgaacatcaattccacaccacgttcccgccgataagcttctctaaagtcaactccatccggtagttcgccaattccggctcttacacggattttattcaaagcctgacgggccgacatcgtacaacccgtaacgactgcatccggatcacctgtcgcttcgtatgaagcctctgccatatccagataaacttgcgaaacacgaatgtacacagccaccaaacgatataattggaaaccagcttcgccaaacaaaggcacacttgcttccggccaaatgaacttcttacacatatatccggtctgttgagagcctctcgtaaactgattggtagaaatgaagttctcggagtaaccgcccgaataagtagtcagataatagggaacaccctgtaaattcttcccccattgctcaccgggcacgaggatattattcgtgaagcgagggtctctatccgagtaaggattggtagtctttaccgcatcataaccggaacgcggatcagtgatcggatagtatttaccgtcggctcccttgcgttcgtacatatctaccgcattttgtgtcggagcattataaggagtaccttcggcaccggttttattatcgtatggttgtgtcagccattgcgctctgacgaaagcagaccagttgccatgatgccaacgcaggaaccataaatattccggctgtgcgaattgattggaattaggcattaattgaatactacgatattcgtcatgattcatcaggcgataatattcgtgactttcaatagcattgatcgccttttgcgcactacgggcagcttcggcagccatgtcttttccatatcctttgttttcaatagaattcaggtcattctgcatcaaagggctggcagcatacagctgtgtcatcgcttttaatgccatggcgcttactctgtcaggccgtccatgttcctcgtcaggccagcttataggtaaatattcaatggctttatccaagtcagtctgcatccaagcattggattcctgataagttttacggggaaagtcaaagtcgtccgatgctccccaaagctggtcaaagatgggcattccgccatatcgtttgataatctcaaaatagaagtaggcacgcaggaaatgagcctgtcccaacagttttctcctttggtcgtctgtgatggatttcacttgatctactccactaattacacggttcacgatacgaagtccggtataagcacgagaaatagcacttttgaaattcgctccatcacttttacttccgatttcgaaacgtgtactagcattctccagccagttacctgcattgacaaacttcgacggatcattatcgcggacggatgcatattcatccgacaaattacctaccgttacatatgtattcgaataagagttgataccatgtgtaaagattaatatatcaccattttgaaagatacggtccatgaaccctaacaaactgctataatctttataaacatcatcttcggaaagtccgtcatcgggagagcggtccagatagtcctcacagcttcctacaaacagacccaacagaatgatccatatccaattcaacttatgtcttctcatatcagtaaatttaaagtgtctcataatcctaatctaaaaccaatgttataacgtctcaccatcggataaacattctgtcccgaatgttcggggtcacgacgggaatctccttttgagaacgtcagcaaattgctgccgttgacatatacttgcagttttgtcagacgtaaaggctgcaaccaacgtttcggaatctgataattcacttccaggttcttcaaacgaagataagcatggttggtatatgtgtatgtactggccaccgaattataacttctctgaacatgaatactggggcgaaccggaccgctttgaatcggagcatcggctgtccatgtattcaatgtattcggttgagccttgatattaccttccgggaaatcccataagtaagatggtattgcttctttataaacatccatagcactgtaccacaacatattgaatccgattcctttgtaagaacctcccaatgtaaatccgagggtagtggtcggatagttcaggtttttcatcggaaccatatccttagcatcaatcataccgtctccattataatcgatgtagtacaagtctcccggaatcaatgtgttgtgtgcaccattggcaatagtggactgtgccgagttataaatatcgtccaacgactggaagtttcccgttgccagatatttattcacgtatccgattgattttccggcttgtttcagatattcgctctgatttttcggatcatcaataaagacaatacgattctcactggttgcaaaattaaacttcgcgtaataattaaattttccaatacggtcattccaagtaacatccaactcaagaccgtgatttttagtcttacccaagtttacttgcgggaaagcaataccactatcggcccatgacggaatcgtgttacgcgtcatcagaatgttattacgcttttcatcgaacaagtccacagtaaagttcagtttaccccacaaacctatttcgataccgatattctgtttaacagactcttcccaagtagcatcagggtcggccagctttccttctttgtacagaggtccccagttactggtctgatatttaccaaactctgcattggcagataattgctcaaacttctgaatataattgaaacgtgtggcacctttatcattaccaactaccccatacgaataacgtactttcaaattagtcagtactcctttggtcagtttctttacccaaggctcttcactgatacgccaaccgatagaagcggacgggaagaaaccaaaacgacgtcctggagcaaacttctccgaaccggtataggcaccgttaaactcggcaagataacgctctttgaagttgtaagtgacacgacctacccaatcttcttcgtaagccgggaagttcatcacattctgatttgtcgattcgttcatcttacggttaaacacaaacaaggcacttacatcgtgatcgccaaactggcggttgtaattcaatgctaattcgtaataaagtttacgcccgtaagccttgaagccgtcataaacaccaccaacaggcaaatctccgggagcgttctcatccggatagcgtttctcggtataattataagtaattgttccgtcagcattataaataggattggcgtaatcatacacacgattcatacgaatatgcgtacgttgggcaaccaaatcgtctttacctaaaatcttacccggcatgatctgggtggtccatgatgaagaagtagtgtaagacaacgatgctttcaatgataacccctttgtaatgaagtccagcttttgattcaggattacatcgtaaaaaccttgatgctgtttaatattacgactacctccttcattcatcagacaggctatattctgatcggagcttaacccgtctccccatattccattactatatttaatcggaaattcattacttggagccgtgaaaaacgttttaaaaaagcgttcatccggagaatcgacattctcataataagacggttggttctgataacccatcttaccggccacattgaacgacagtttagtggtacttgttatattgaaatcgaaattactacgccagttatagcgacggtaggagaaggaaggatcgaaatcctcttgtttggtagtattaaaaatatctccgtcatgcaaataacccaaggatacgaaataactcattttcttcgtaccaccgcgtacattaagattataagcctgttcataacctacattctttaccagttctttccaccagtccacttcgggaaagacatcgttatacggaccgtaatttccggtagcatacgcattttcccatgcggtaatggtagattcgggaaccattgctccccagttaccatcattagcctgtgccctgttatactgtttcatagaggtcacatagtcagaccattcaggagcggcagaaggttgtttaaaaccgaagttagcagtgaatgagatttccggtttctgttcgagtccgcgtttggttgtcagcaagataacgccgttcgcacctttcacaccgtaaaccgcagttgccgaagcgtctttcagtacggaaatagattcaatttcgttcacatcgacatcgttgaagtcacgttcgataccgtccaccaatactaacggagcagcttctccccaagtggacttaccacgaatcaacaaagaagctttatcggctcccggctttgaagtggaattgatagcaaccacacccggcatctgaccttgcaaggcttcggaaacggagttcacgctacctatctttaataaatcatctccttttgcagtagcaatggaaccgacactggacacctttttctgtacaccgtatccaaccactaccacttcttccagggtctccgtatcttctcctaaagagattacgcctaaagtcgttttattctttaaatccagttccagagttttataacccacataagaaatgacaagtatgtctccttttgatgccttcacagtaaaattaccgtcaaaatcagtaatcgtaccgcttcccgtacctttcacgcgaacactgacgccaatcatcggttcaccggatactgcatccttcacttgtcccttccaatagtcttgttgtgcctgcacgtccagcgcacaaaacaaaaagcaacaaagacataagaaagaaaaataaagtctgtctcttttcataaacattatttttaactgttaacaaattctttatctcaagacacaaattaagcgggaaaatcttcaaatgaaagggaagaatctccttaaaacccgtacaaatgtgcaaaatagatttctctactacatttctgaacaaatcatttccacattggctttatgacgtgctctttgtctacggtgatattgtatatgccatcgtttcctttcttcaggatgagcggaacaatacgtgttttacgaggagacacggtggaatccgaacgatgaacgtggtaaacatagtaatattttccatccagccctttaaatacatctccatgtcctgatccgttttctcctacgaggctgcgatgaatgatcggactgttcgggtgcttcttccacggaccgaaaggggaagaagcagtagcatagcctaccgaatagtcgatattcataaaatgattggcagaatagaaaagataatataccccgtcccacttcataacagtcggcccttccatcaccggtgcagacttatagttcggagtcttttcccaaggctccgtacagtccatacattgtttcaatgtttccggtttgatacttcctttctttatgtcaaactcggctacccaaaggtaattacctttattaaagcggacatgatataggtagtacttcccatcatcatccttaaataggaaagagtctatattcttagcggaagcgtctatcggcttgacttccttctgccggaaaggaccgaacaccgattttgaggaagcaattactgtttgctcattagcggtataagtgaaataataagttcttttatccttaaagtattgaggtgcccagaagcctttttcaccatacgtttgatctcctttccgcagaatcagttgtagagaagtgtcatcaggcaccgtccaatgctccagatcggtcgattcgaggatagcaaagccctgtggttcctgattgcgtgtgccggtgaggtaatacttgccgttctccacataaattgtaggatcggcataagtaatctccttctcattaaccgaatcagctcgtaccccagtgacagacaaaccaatgattcctaatgcgagaataagtctttttgtcattttatgttttttcatacctattttattctatatctgatctttatctcatctacaaaatttcaatctaacatccaaaccaaaccgggtttctcccctgcgagattccatattgcttcatcccaagaaagagccttggcagcatctatcggggtactcatcgtagaaagaccattgtaacggtcggcaccaaatgtttgtgctccgtaatcgggtatttcttcgtctacgatagcgggcgtattggcagagaaacgacattccatatttggattcgcatagcaattattagcctcattcttgttaaagcgtccgcaaattcttcccgacttaggtgcaccgttagagaataatttctggttccaagccacacaatgtgttacggtgattcctgtcgccttgttagcaaatcccataataccgcctacctgattttgagcggaaatctcgcaatcggaataacaataagagatcacagctgtcggactaggatctacaaatccggcaataccacccgcaggattcgccactttcatcgggaaagcttgtgcaagacctgaagaataacactgcgtaacgatagaatataacatacgcccaacaatgcctcctacacatgattcagtcacaatatccccagtggaagagcattgagagatcgttgctccgcctctcgtttccccacaaataccgccggcgcaccatacggcagtaatatccgttgccgatgtacactgatgaattttactatctgcaccatgaagtcttgcacagataccaccagcctgaccgttatcccaggcagccgctcccgttcccgaagttaaagaaatcgtaccggatacccgaacattctccacgatacccggagaagtagcagctcccacctgtccggcaaggatgcctgccatctttgtattggctgtaatctgcgcattttcaaagtttatattagaacacttaccaaccaacaatccaaagaatccctgattaacagaagaggaagtatttactttcagattacgaatcgtatgtccgcctccatccaatacaagttgtttggaaaccgaggtctctatcggttgccagtctacaccttgcaaatcaatatcattctctatcttggcatagatcgtcttaccatctttgagtttctctccgagagttatcaggtcgttcgttgtcgtcaaggtataagggttgtcgatttctccctgtttctgttgcaggaagaaagtcattgtacttttctcttgattgactgcaagatcgtcggaaaccagtttcaaaccgagaacgtatttctttgatccgtcaagcgtacctaaatcatggaagcgcaaatttaccatacgcaggacatcgtcccccttaaaattaaaattacttccatccagatcataatattccacaggtaagaggtgatattcttcaccaaactctttggcatcgacaacagccaattccgcctttgcttctttttcgcaatggcttttctccaccataatgttatattggtattccggctcatccagatataaatcatatttgcctgtctgataaagcgacaaggtaatattggaataggtaacttcagccttttccggctgtgtcagatccatgacttcaccacatgatatcaacgaaaacgccattaatgacgctacaacaggaatgtatcttttcataatatctttcttttaattattaaaaaacagggattaccataccgacgttatctcctgacaaccaaactttatctccatctatacgaactacctccatctccatcccttctttgaggaaagaaactccttggaatgagaattcagtctttatcttttgaccgacagccgtaggcttcccgtcaaacttcacatgaatgtatttgctttgatccgaattttgcaggcgataagtcaaccgtttaggattaattgcagcctgaagttgttcctgctctgtaaaagtacaaattccatccaaactataaaacccaacttcggtatatcctgttatatttttcttatcaaccccgttttcggcatattccgtctccgcacaagaggtgaaagccaacaaacatgccaacactacatatattactttcataagcgaataaatttaagataattactttctaatagttgtcgacaacatttctaccgatccatccttataagtcacttcggcggtaagtatttgtccgttcaggttcttattcactatattgatttcctgtccatccagctttactttataagatgagacatcatccggcaaatttaatagttgtaccaacatatatccatccacttgttgatatttcaacaaaggaaactctcctgttacagacttggtcttaacatcatccttccacaacacggcatcatccgatttcagcaatgctacatgataagtcgttccgggaacaagattttcaaccaatgtatagtcattctccgaatcaagcgatcgacgcaccacctctgttccctcttcatctgttactgacaatatacctgttttatcggctccattaccccaacttatgaacaattcccgttgtcctccgacaaggctggaaactgccaatccatcccgggcagcaataaaatcaggatataacaatggattgggattgtagaatccgtctgcatcaagtcctaaataacgggaaaaataaattcctccaagttcccacatttcagtcttcgcatcgtaaacagctctcgctccaccgggaaccacactaaaacgtccggtaatggcatacgtatcatatttcttgaatacttcataaaaagtcttataccaattcttcggataccaggaataactctcaaaaaggctcttgaactcggttgcactcaccggtgtaccggcgttagctttttcggctatcagattaagatattcgtaaattttcatcccggccgtataaccatgcttggttccccattctcccagcgcatccgccacatgaggatttaaagcacgcaccatagagaattccgtgcaaatcagcttttttgttacgccgtacttatcacggataatccgaaaatcatcttccgcctggttgattttcaatgcgtgaacgtgcaagtcgagccctacaacattaggattgttattaaccacagagactactgcaggtaccgtttcgctcttcggcaactcggaaacacggttcaatgctccggcataaatatcaaatgtccagccattagcctgtttccaagtagtcagccgattggcaaactcattcagaaatgcccgataatcttcaccatccgcatgacagagatcggtatccaacgcattctcccattccggctcgttacccatgacaagtatttcaatattcttcgccatatcataggttttcagtaatatttccgttgcctgaaatatgtactccatctccttagttcctactttgggaaccgtatcggtatataattcaaaaggtattttcagactcaagatgaatttcacacggtcgcccaacgctttcttggcctgaataaatttcaatgtaggaatatgtgtcctgatggcattttctttcacaccaacaatcttcccgttttcattctgaagaaacagattggggatattgacaaatcctctcacccaactcactttcgactgtttcaacatctctatttccgtaatcgggtaatctatattttcattatagttcgcccccaaatcctgcgcctttgttcccatcgaacataagaacagcaatacaaacattaaaaaagctttcattttcatatacatacttcaaggttaattgtccgacatcgaacagaacaaaggtagagaaataaatcccggtagaatagaacgattgttttatcaacgggatttatgttcagaataaacatttgaccttattttaatggttcttcttctacttcgctgcgataataaccatccacttcagcaaagaaattctgcttcagggagtccagaagttcgggctgttgtgccgccatattctggtattgagttcggtcggcttttacattgaataaaccgtattcacccaagttacccaattcatttccggtcaggttgcgttcggaacctttataaggaggcatcataatccagtcgcccgaacgataagccatacgtccttgcgcttccaacactacatccttgcgggcagtctgctcttttccgaagaaagcatccagatagttccgactatccaaaccttccggcaaatcggcatgtatcatcgaccccagagaagcaagaatatctacctggcaaaccagtgcatcggacacaaccggctgaatctttcctttccaataaacaaacaaaggaatatgcgtaccaccgtcgaacaaactatatttacctccgcgcagacctcctgcaggaaggtgatcgcctgccagttcgggagcaccgtctttgtaaccgtcattcagaaccggcccgttatcactggagaagataatcagtgtcttttccaacaatccttctttcttcaagtgggcaagcagttcgccgacacaccagtctgcctcaacgatggcatcgccacgaggccccatcgttgttttgcccacaaatcgctggtggggagcacgaggtacgtgaggttcgtgcaagccataatacaggaagaaaggagcatttttgtgttcagtcacaaagttctttaccttatctacaaaatagtcggccatatcctcgtctttccaacgggctttctgaccgcctttcatatatccgatacggggaattccgtttactatagagttattgtgtccgtgtgcccactgcattttcagcatctccggatgagaaatggcagtcggttcgccttcaaaattatgctcgtaactcacttcgatgggatcggccggatcgagtcctactacatcgccgttttccacgtaaaccgtcgggacacggtcgttggttgctgcaatcaggcaagagtagtcgaaaccaatttctttggcacccggtttgacggtttcgttccagttgacattgccgtctcccatccccaaatgccactttccgatagctccggtcacatacccgcattgctgcatcatcttcggcaaggtaaactgattttcattaatgataagaggagcatctcccggcaggatttttgcatccttatttttccacggatacattccggtcatcaaagcgtaacgactgggagtggaagttgccgaagtggcatatccgttcatgaaacaaactccgccatgagccagactgtcgatattcggagtatgaatcgtagtagagccgtaagcgctgacatcaccaaatcccagatcatcggcaagaatcacaatcacattcggcttttcttctacgtgctgtgaggtacaacctactaaagacaacgtaggaactagatagattatctttttcataatattatgtagttaataacgatgcaaatttagccaccacttatttatttatgtagaacaaatgtttaataatggggagaaatgtccatcctgcaactattccagagaaataaggtatgaaaatgcgtgtgatgaattaactcgaaataatagcataggcctgtcaatgttctacttttaatattctacaggaaaatagccagttagaaagtagcaaactagaaaataaactgtataaataaacgcatgagcatacaaaaaacagtctaatattgcataaagccaaacaagatatacatctttctctattcgggaaccgttcattgccttaaaaccaacgaagtgttcctcggtgtgcatcgacttgttcctcaccgaggaagctatcgttctccggtgaagaagataaaaatggactattaagaaatattttctccttagtttatcataatatattggaaaggagaaaataataaaatgattggttattcaggtatctactctccaaataacaaaaagaatcaagaatctatcacaattcgattagtatattctcaaaacagcgaaaatagagaatcacgtaattacaaatgcatggcattttccggcttttctttaccaaactgcgatttatgtccttctccgatgattaaatattccttttttaagaatcatcgttttttaagggaggctatatagtttggaatagaggttgtgcttaacaataaaaactgtaatagtatacaggaacagccaaataagatattaccggattctgacaagattaggtaatgtcttatttttataatgaggaaaattgttacctttgtatatatcttatattcacaattaagattaaacctaatttttcgcttatgaaaatagttaaggctacctacatcgttatattcattaccggactattagccggagtgttcttctcatcctctgtttccgcccaagatatttcgggaacttggcacggaaaactttccattcccaccggttcgctgactattgtattccacatcagtcaaacggaacaaggcgcttatgtgaccacactggacagtcccgaccaaggagccaacggtatcaagacacagaccacttctttcaatgattcaactttaattatccagatacctatgattcatgcttcgtacaaaggaaagctgaacagtgataacacaatcaacggaatatttacgcaagggatgccccttccgttgaatttgaaaaagggagaagccagccgccccaagcgtccgcaggagcctcaaccgcctttcccttacagaagtgaagaagtcaccgtgaggaatgaacgcgatggtattaaccttgccggaacattgactcttcccgaaaaaggaactaaatttccggcagtggtaatggtgacgggaagcggtgcgcagaaccgggatgaggaaatcatgggacacaaacctttctttgtcatcgccgattatctgacccgaaacggaattgctgtgcttagatgtgatgacaggggtactgccgcttcacaaggtactcacgcaacagctaccaatgaggattttgccacagatacggaagcaatggtgaattatctgcgcagcagaaaagaaataaatgcaaagaaaatcggaattatcggacatagtgcaggcggaatcattgcattcatcgttgccaaaaaggacccatccattgcatttgtcgtttcattggcaggagccggcgtgagaggcgacagtctgatgctgaagcaggtagagttaatctctaaatcccagggaatgccggatgccgtctggcaagggatgaagccttcgatacggaacagatatgccatactgcaacaaacagacaaaactcccgaagagttgcagaaagaactgtatgcagacgttacaaaaacaatgtctcccgaacaatcgaaagacctaaataccatccagcaactatccgcacaaatcagttcgatgacttctccgtggtatcttcattttatgagatatgacccggcccaggatttgaagaaactaaaatgtccggttctggctctgaacggagaaaaggatattcaagtggatgccgccatgaatcttgctgccattcaggaaagaatcaccggaaatggaaacaaaaatgtaacagtcaaagcctatccgaacttaaatcatctgtttcagacttgcgaaaaaggaacattggctgaatacgggcagttggaagaaacaatcaatccggaagtattgaaagatatcattgaatggataaggaaacaataagtctattaatgatattacttagcaagtacacatttctcaatatcacattcttttcttgctaattcttgcaaattcttcaaatatttgcaagaattggaaagaaagtaaatggctacaatttacatatactacataaatctcccgtcatcagcttacaccaacattgtctaatttgatttaaatcaaaatccatctcatcgaactcaccctgaaagattttgttttacctttgcagccaaaacaaataagcggcaaataatagtaaggtaaaaaggtaacaggtattaaggtaaagttttgtatgaagaagagtcttattgcattggcgttcggcacactgggattaggtattgccgaatttgtaatgatgggaattttgcccgatgtggcaaaagatttaggtattagtattcctaccgcagggcatttcatttctgcttatgcattaggcgtctgtgtcggtgcacctgtattgacactggctcgcaaatatccgctaaaacatattctgttagtattagttaccttaattatgataggtaatatctgtgcggctatggctcccaattactgggtgttgctcgctgcccgttttatctccggcttgcctcatggtgcatacttcggagtaggctctattgttgcagagaaactagccgacaagggtaaaggttcggaagccgtctccatcatgattgcaggaatgaccattgccaacctgtttggtgtacctttgggcacttccctaagtaccatgctttcctggcgtgccactttcctgctggtcggtatctggggaattgttatcctatattacatctggcgatgggttccgcatgtagaaggcttaaaagataccggctttaaaggacaattccgctttcttagaactccgactccgtggctgattctcggtgctacggcactaggtaatggcggtgtattctgctggtatagctacatcaatccgatgcttaccaatgtgtccggcttctccgcagaaagcattacgcctttaatgatccttgccggcttcggtatggtagtgggaaacctgattagcggacgtctctccgaccgctacacccccggaaaaatagggactgccgctcaagcacttatctgtattatgttattgctcattttcttcctttctccctataaatgggcagcagccctgttgatgtgtctttgtacggcaggactgttcgcagtatccagtccggagcagatattaattatccgcgtatcaaagggaggagaaatgctgggagcagcctgcgtgcaggttgcattcaatctcggaaatgccatcggtgcttatgcaggcggactggctgttagtggtggataccgttatccggctctggcgggtgtaccatttgctctaattggatttactttattcttgattttttataagaaatatcaggcaaaatactaaataactagtaaaagctgccctactttctgctgcaagataaaattcactttaaagtcttgtagaattatatttttactcatacttttgtaaggtctgttaagtcttgataaatgggaatgaggaaagatacacttatcacaattattatgggagtaattagtatatttacttcttgcaatccgcatcccaatctatcaaaggctgaccaactaataaatttttatcctgatagttccctgacatatttgaaagctatccagcatcctgaaaatatgtccccaaaggattatgcaaaatggtgcctattagtagctcaagcaaaatataacaatgctcaaagtttagttccggactcatttgtttttaaagcttttgattatttttccaaagacacatctgacccgatactaacagcaagaacatatttttatactgcacttatcagtaaagaaataagaaacatagaagaagctgctcaatacttattaaaagcaagagattttgcggaaaaagcaaatgactacaatctagcattcaaaatttcccatgacttgtgcgacatctactctaaacaaggattatttgattataagttaacagaggcatggagaggatataattatgcacagatttctaaagatagtctgtctatttattatgcattggcagatctgggacatgcttattctaccaaagagcaaatcgatagcgcactttattttttcgaaaaggcattccctattgctcaaaaagtacatcccaaagccacctcttctgctttaaacgatatatgttatgcatatataaataaaaaagattatatttccgcactaaaaatctgcaatgaggccattgcatgtgaaaaggattcaattgaccgatataacaattacattatcaaaggagtaatctttcaagatatacaacaatatgattctgctatccattattttaccctaagtagtaaaaaccaatatatatatgcaaaagcactcagttatagctatctgggagaaatttatgaaaaaaaagggaacattcttaaagcgttagaatttatcaaaacctatgaactattaagagattcgatagaagatcaaaaccaaagcgtggcaattattaaaatgcagaatctatttcaaaacgaaaaactgcagaaaaataacaaagaactatctaaaaagatggaagaaattagttctcttgtatataaaataagtgcaattgcagctttcgcgttactaattacaggattatgctacttcataacctacaaaaagaagagtgaacgtatacgaaaacaagaaagagaaatatctcaagccaaagataaactacaacagcaagctatagaaaatcttcaaaaagaagaaaaactatcttcactacaagcagactttttacgcagattagtggctatcaacattccatctctaaataataaagcaaacgatctcgttatcaaactttctaatgaggattttgctaatctggaaaaagatattaatgctacttttgatcaatttacagtaagactaaagaaagaatatccactactcgacaaaaatgaaatccagttctgctgtttaataaaaatacaattagatttaaatacccttgccaatatctactgcagaagtaaagctgcaattagcaaaagaaaacttagaatcaaacaagaaaaactaaacattacagataaaaacatctctttagatgattttattcaaagattctgaaatatcccttcttacattaacatctattcataataaaaggatttaattgccatttgtccaatggtaatctatacctatttatattaatacattagttattagcgatttatataatatctattgtccaatgctttttttgtattcataaatcatattccataactttgcaatatcaaacgtaagcaaaatcagattctataataacatcttgattaaactattaatatataatataaaatgtgatatagcaaaaaaatcaatattaattatttaaaactagaattatgaagaacctaatttggcttagcgcatatcttatcataagcgcaattttcagttcttgttcaaaagacgacgaaaacacctctattattccggaaggagaaaaaacaaatgtaaatgtatcattaaatattgctcctatcaacgcaatgggaaccaatataaatgataacagaacttctattgaaaacttttggttattagaattcgatcaacaaggtaaaaatgtcgcagttataaaagaactacgattcagtatcaactctccagaaacagtagaattagtagcaggggttaatatgaaactgatagtaattgctaatgtagataaaagcattgttttccaattaggaaaacaaacttatgaagcactaaagaatactatttatacattaccagtcaattcatctaacgcaattccgctagtaggagagcaagtagtttctattaccaaagaaaatcaaacattagatgctatcacattagaacgaattgcagctgaagtaaaattcactatcaataatacctcttctgacttccagctaacttccatagcattaaagaatatatataaaatgtattactttagtaagggaacaatatctcaaagtaatattgcagactatagtgaaaccccatgtactatcggtgaagaaaattatacccattacatagcggagaacctgatgggaacaaattctagtatcccaacagacaaagacaaggtaacagataaactagcgactttcattgaaattgttggtgaaagaatgagtgaaggcaataaagaaatagcaactttcaaaatgttcattggagaaaatgaaaaagatttcaatgtaacaagaaataatgcatataattacaatattaatcttaatctggcagatgccagtgataaacgcatcactattgaaaagattccattagaaggcattgcagctgaagctaactgctatatactgaatccaaattcagaacatgagctactggttcctgtgaaacgagtaaatgcattttggggaacagaagaaggcggcttcaaaacagatcatatgttgaatgacggaaacaaccaaggaaaagtaactaaatggattgcccgtatcataacaaaagatagttccaaggaattactgaaattcaccacccaacaaggaagctccgccaatgattatataggaatcaaacctacaggaaacgaaggtaatgtattaataggtatttacgacgcaacagcaggagaacctgctcaagacgctaaaccattatggagctggcacatttggattacagattataatccgggaggagatattaatggaataattcctgcaatttctcaaaaccctggaaaagcagatgttacaggaggagctatctaccgttttgggggaattgataacaatcaaacgaaagatgggtccacccaagcaatgatggatcgcaacttaggtgcactaagtgcaacaccaactgacggtgcgaaaacgatcggtatgtattatcaatgcggtcgaaaggatccgataatgactgattggagccaaatcactaagttaggaaccagctctttagggggagacgtttactccattcatatcaaaacagcaaaaggtcccgtatctaaagaaacagctgtgaaaaacccagatacctatttcttgggagatgcagaccattttacttataaagactggttaattgaaggcagtggtagtacagaattatggtacaaaaagagtgatgaaaaaaccaaaacactatacgatccatgtccggcaggctggagagtgccttataaaatgaacacttatgatgaaataaacggagaagacattgacaatggtatatatctttgccctaataatagttccataaaaatattttacccgtttggaggacatttaaatgccattaccggtcaatatccgggaggaagtttgtttgaatacaaaactgcacaaaatggttggctaggcagttatccggacaatcctaataatgcctatagttatcatatattctctgcaacattagtggacgaatatgacggaccattctttcccatcatgcctaacaatgcagacggcagatacttaggttatagcgtacgttgtgtaaaagaataaatcaccaaagaaaacaggtacatgaataaacacattattctattatttatcatattgtgcattggccttacaagggccagtgcacaacatagtattaccggcaaggtgctagatgctactaaccaggagcctatcccatttgccagtgttactataaagaacgtcaagagcggaacaactacggacaataatggtaattttaccttaaaggtcaataataacgatatccttatcgtcagttttatgggatacgaaactaaagaggttaacattggaacacaaaagaaagtaacgatattattatcagaatcttctgttttattggatgcggtagtagtcaccgggtttcagaatcttaaaaaaacaacctttaccggctcttccgttaaaatcaaagctgatgatattaatttgcccggtgaaacagacataagccgtatgctggaaggcaaagcagccggagtatctattcagaatgtatcgagtacctttggtagtgcccccaaaatacgtgtacgtggtgccacgtctatcaatggagaaaacaaacctttgtgggtagtagatggaatcgtattagaagatgtggtaaatgtatctaacgaccaactagcaagcggtgaccctaccaccctgttaggctcctccgtagcaggtatcaatactaacgatatcgaaacaattgacgtattaaaagatgctgccgcaacagcattatatggagccagagctatgaatggagtagttgtaattacgactaaaagaggaaaagaaggaaaaccacgtattcattatagcggaaactacacagtacggaccaaaccacgttattctgaattcaatattatgaattcagccgatcaaatgtctgtgtatgcagaaatggaacgaaaaggcttattaacttcggacattgtaaataaccagtcttccggtatttatggaatcatgtataatagaatcaacacatgggatgaatcaaagcaacaataccttttagagaattcatatgcagcccgtcacaactttttaatggaacacgcagcagctaatacagactggtttgatctgctatttaccaattccataatgaatgaacatacattaagtgtatcaagtggttcacaaaagtcgaaatcctacatttcattaggctttttgaacgatccgggatggactgttgccgacaaagtgaatcgaatcacaatgaacttccgaaatgactaccagctaaatgacaaaatcggatttagttttcaaacggtaggttctgtcagaatgcagaacgctcccggttcattaagtcgttccagtgacgttgtaagcggtatttcttcacgtaattttgatataaatccgttcaattatgcattaaacacaagccgtgcattacgagcatacgactcaaatggagaacgggaatattatacactcaactttgccccattcaatattttagaagaactcgataataactatattaaattgaatgtgatagatttaaaagcccaagccgaatttaactggcaaatttttaaaggattgaaatacaattttaccggagctatccgctatgtacgttcaaagcaagagcatgaaatacacgaaaattctaatatggcaaatgcttatcgtgcagctggcaattctaccattcgagaaaacaatccctacctctacaaggaccctagtgatccgtcagccgaaccgattgttgttctccccaaagggggattctataatactgccgaaaacttattattaaattatgatataagaaactctgttagtttcagcaaaatatggaatgagaaacatgagttcaacgcattattaggacaacaaatcaaatattccgatagacaaacgaacagtaacaccggctacggattccaatatgacatgggaggcactgttagtatgaactatcttataatgaaacaaatgatcgagcaaaattttgattattattcaagagctttgacgtacgatcgttttgccgctttttatgcaaatgttgattacacctatgacagacgatattccatttccggaacagtacggtatgacggctccaacacaatggcaaattccagttcagcccggtggctgcctacctggaatatcagtgggaaatggaatataggtaatgaagcgtttatgaaagattttgtctggctggatgcattagcgctacgtgccggcgttggattaacagccagtatgcctccattatcaaatgcaacacccatttttataaattccaatactacgcgaccaagtacggacatcgaatcaggcattgaaatttacacattaggtaattctgatttgacatgggaaaagagttatcaatctaattttggttttgatgccactttccttaaaggaagactcgacttttcttttgactattttatccgaaacagtttcgacttgttaagtgtaataaaagtctccggaattggaggagaaagatataaatgggccaacagtgccgacttaagcgcctccggtttcgatataacattgtcaggaaaacctattgtaacaaaagatttcatgtggtcaagttctttcactatgggatattccaaaaatgaaatcaagaattcaatgcaacaaccacaaatcaacacgttggtaggaatcacaggaggaaataaaaacgggtatccggtgaacgggcttttctctataccatttgccggtctgaatccggaaaatggtgcaccgatgttctatgatgagaatggtactatcactagtgatatcaatttccaaagtacttcaacagattacttaaaatacgaaggaccgacagatcccaaatatacaggagggtttaacaattcctttacttggaaaggtatctcattagatattttcttcactttccaagccggaaatgtaatccgattgaatcctgtatttaacagcagttataatgactctcaagcaacccccaaagagttctttaacagatgggaattcagaggagatgagaagcatactaatatccctgcaatagctgataaagatctgatatcagatttgagcagtacttatccttattcagcatacaattattcagatatacgggtagcgaaaggagatttcatccgtcttaaatcattatctgtaggatataccattccgcagaagcttttcaaatcgtggaagttgttctctgatattcgtttacgagtaaccggcaaaaacttatggttactatactctgataaaaaattgaatggacaagaccctgaatttgtcaataccggtggtgtagcccaaccgatacaaaaacaagttattttttcattagatgtcagtttctaaatcatccttatacaatgaagagaattaaaatatacttatatattggaatcatgtccttttgtaccagttgctctgactttctggacaaagtacccgacgaacgtactcaaatagattctccggataaagtatccgcattactagtaaatgcgtatcctaaagtttcttatgcggctattgtcaatacccgttgtgattacataaccgacttcggaagtgtttactctggtgcgcaaccaggagcattattcagctttatgggtgaaaatttcttatggaaagacgtgatagaagatggaaatgattccttcgaaaacttctggacaggatgctatgcagctattgcagtatctaaccaggcgcttgtttctatcgacgagttaggaacaccttcaagcacaatcaatcaaaagggagaagcactcatgaccagagccttctcacatttttgtcttgcttcactctttgcccaacaatatgacgaatcgactgcatcgttatatccgggtattccttatgtagagaaaccagaaacacagccagtagaacaatatgaccgggaaacagtggcagacacttatagaaaaatcacacaagattttgaggacagttatcctcttatgacggatggaagcatttatacagctcccaaatatcatttcaataagaaatcagctgccgcctttggtacccgtctttatctattaatgaaacaatatgataaggtacttgaatatgccaatcaactcatttccataccgtcacaatttgaaacattgacggatagtaaaggagaacctcttaaaaatcaagatggtacaccgcaacaatatatctcaaaagatgatcctgcattttcgtttgtaagcaacaactttcatccttttgcaacaacttacatggatgcaagcggatatattgaaatgcgttcgtatttctgcagttcttccaccaatgccaatttattgattacagaagcattgtcttcaatcgcctggggagaattacccttctattcaagatatggtttatcttctactgacattggcaagacaatcaatgcagataatgttataaatggcatgtgggctattccctattacggtacatccaatttctacttcatacctaaatttacccaatttactaaacaagaatctttagacgcatccaactttttgccgtatgccaatattcctgttttgagaatggaagaagtgttattaaaccgtgcagaagcctacctaatgcttaaccaatatgacaaagctatcgctgatctaaatttatatgccagccaacgttttgttatagcaagaagcccggcatcaagcagatattatgattctaaagaattatgtattacacgcgataagatactcaatttctataaaaccaaacttaataatactgatcacttcatcaataagtacaatcagacagactcttggagtgatttgaaaaaaggtatcctacttgcaatacttgatttcagaagtatagagttttataatgaaggacttagatggtatgatattgtacgctggaatatccccgtcacccatacccaagctaacggcagcaagtccagcttaatgccggacgacgaccgaagggtactacaaattccggaaatggcaactatttcgggaataaaacttaatccaagaaataacgtaaataatacatgggaataaaatgaaaacaacaaatcacattgccaaatggatacaagcatatttcatgctactattctgcattagtactgttattttcactgcctgtaatgaggacaaactcaatcttgaccaagagatttatggattgggtggaaatgacgagcaaaaaaatgaactggataaatggttatatgaaaactatacccaagcttacaatatcgaagtgaaatataaatggaacagttatgaactgaacactaccgcccaactagtccccattatggaacgcttcgtaaaaccttctatggatatgattcaacgagtgtggtttgagccttataaacaattggcaggagataaatttcttagagaaatgacacctaagaaaatcattttggtaggtagcccggaatataatgcagatggcagtcaagtattaggacaggctgaaggcgctcgtaaaattacactatttgatggtaatagctacaatccgagtgatgcagactggatacgttctatcatgcataccattgaacacgaattcgctcatattctccatcaaaccaaaatgtatgattccagtttcaaagatatatccgccggagattataatccgacaggatggacttctgaaacggaagtaagcgcattacttgccggattctattccgcatacgcaatgtcgggagttgatgaagatttcgttgaagtggcatcattaattatggtgtatggaaaagaatggcgtgactatcgaattaatttgctcaaaagtttaacaacgtctcctccttcagagggagaaacagcagaagaaacagcacagcgtatagcccttgccaatcaggcacaaacggctttaaccagattactggctaaagaagaaattgtgatcaattactttaaaaatgtatggaacgtacagttttatgacgacgcaatgggaaataaaggattagtatctttagtacaagatgctattaatcaaattgtaaatgaaaacactccagaataaataattatgaaaatagtttatacatattatcttctaacctgtgtagcattgtgcagtatattttcatcttgcaataatgaaaccgacatttatatggaaaacccggataaacggattcaaactaaaatgcaggaatatactgatatactcacaggagctcccgatggatggattgcagaaataaatacccaattaggaggtattcacaccttatggatgcaattcactgcagacaatcgagtatctatgatgttcgattatgtagaatattaccgcgacttgaaagcaagtccgtttgaaagtagctatatactcaagccactacaaggaccaactatatcatttgatacatactctttcttatctatctttgcagatcccaaccagctgatgaatggtgcaggacaagcaggaaccggattaggagcagactacgaatacgagattatatcctacaaaaacgatcagtttctcctaaaaggaagaaaaaacaaaatggaagctacactgactaaagctaccaatgaggaaagagaggccatcaaaaatggcgccttaatggaaaatcaggatcaggctcctatctatcaaaaaaaatacttcactttcagttataaaggacaagcgtatgattttgtatctaatggtagaaaaacaggtttcttatccgctaacaatggaaatccgaccctacaaatagaaggttctaaaatagacctgaacggaaatatcgtaatgatgaacccgttaatccttaatggttacgaaatttatcagttcaacaagacatccaccggatacactacacaagtaggcaatgatatacttgaaattaaaggaggtactacaccaattgttcctctattcaatgtacctccaggagcaattcatcagacaatggtagtgtacaacgatatacaaaatcaatggtcatccgaatattttgataaacataaagctgctgtttcgaatttatttgcattcactcaaactcaattctatattgtgtatgttgccatacacatgtacacagacggaagtatagtggagattggttataaaatatatcaaaacggttcattaggagccgatacttacggattctattatacattcaactatcagaagaattcagatggttctatcacttttggagattatacaccgttcgatacaagcaatcctaatcacgaagagttcgacaaatgtctgtcacctattttagatggttactttaaaaaacacaaattcttcattaaaagctggccggctttgtacaacaattccagccaatatgtgatgtcctcgctaattcctgcagaagataagacacttggtgtcatggtaggcgtacctatgacgttctaaagtttactttacatttatagggatgcctgaaaacggcatccctcactcattaaatagatataagaaagaagtatttgttttccaaccaatgtatataatctaaaaatgcctatctttgcagtcagattatcgataactaaataaaaacgaaatagataaatggcattgcaatgtggtattgtaggactaccgaacgtgggtaagtcgacacttttcaactgtttgtcgaatgcgaaagcacaggcggcaaatttccctttttgtacaattgaacccaatgtaggtgtaatcactgttcctgacgaacgtttgaacgcactcgctgaattggtgcacccccaacgaattgttcctacaactgtagaaatcgtagatatcgccggactggtgaaaggcgcaagcaaaggtgaaggactaggaaacaagttccttgccaatatccgtgaaacagacgcaattatccacgtactccgttgcttcgatgacgacaatgtgacacacgtagacggaagcgtaaatcccatccgcgacaaagaaatcattgactacgaacttcaattgaaagacctggaaaccatcgaaagccgtatccagaaagtacagaaacaagcacagacgggcggagacaaagctgcaaagttagcttacgatgtactcgttcaatataaagacgcactggaacagggaaaatctgcacgtacagtgacttttgaaacaaaagacgaacaaaagatagctcacgaactgttcttattgaccagcaaaccggtaatgtatgtttgcaatgttgatgaagcaagcgcagtaaacggaaataaatacgtagatatggtacgcgaagccgtaaaagacgagaatgctcaaatcctgattgtcgcagccaaaacagaagcggacatcgccgaactggaaacgtacgaagaccgtcaaatgttccttgccgaagtaggcttggaagaatcgggcgtagcacgtcttatcaaatctgcttataaactcctgaatctcgaaacatatttcactgccggtgtacaagaagtacgtgcctggacatacgaaaaaggatggaaagctcctcaatgtgccggagtgatccacaccgattttgaaaaaggctttatccgtgccgaagttatcaaatacgatgattatatcaaatacggctcggaagcagctgtgaaagaagccggaaaactgggtgtggaaggaaaagaatatgtggtgcaggatggcgacatcatgcatttccgtttcaacgtgtgattatcggttaccaccgacgacttattaattactaattcgctaacaatatgaaatatctcattgcaggaacgggaggtgtaggcggcagtatcgcaggattcttgtcgctggcaggcaaagatgtaacctgtattgcccgtggagctcatttgcagtcgattcaaacgaacggtttgaaactgaaatcggatttgaagggcgaacatacgctccggattccggctactaccgctgaagaattcaatggaaaagcagatgtgatatttgtatgcgtaaaaggttattcggtcgattctatcgtagaactgataaaaagagcagcacacaaagacacggttgtcatccctattctgaatgtatatggcacagggccgcgcatacagaagctagttccggaagtcaccgttctcgacggctgcatctatatcgtaggcttcgtatccggcaccggagaaatcacccaaatgggaaagatattccggttggtatacggcgctcatcgcggcacagttgtaaaacccggattactggaagctatccaacaagacttgcaggaagcaggcataaaggtagacctctcaccggacatcaaccgggatacgtttatcaaatggtcgtttatctccgcaatggctgtgacgggtgcttactacgacgttccgatgggagaagtgcagaaaccgggaaagatacgggatacatttatcggactttctacggaaagcgctgccttaggaaagaaactgggcgtcgaatttcccgaagacccagtcagctacaacctgaaagtgattgacaagctcgatcccgaaagtaccgcttctatgcaaaaagacctggcacgcggacacgactcggaaatacaaggattgctcttcgacatgattgcagcagccgaagaacagggaatagatataccgacctaccggatggttgcggagaaattcaaagaatctaatcattaacattaatccaatatagaatgaataccatgctattatccatcaactggaacccgaatcccgaactattcaacctgttcggcatttctatccgttattacggattactgtgggcagtaggaatattctttgcttatgtggttgttcactaccagtaccgggataaaaagatagaggaaaagaagtttgaccctcttttcttttactgtttctttggtattctaatcggtgcccgcctaggacactgcctgttctatgacccgggatactacctgtctcatttttgggaaatgattcttcctatcaagttcatgccggacggaaactggaaatttaccggatatgaaggacttgccagccacggcggtacattaggactgataatcgccctttggctgtattgccgcaagacgaagctccattatatggacgtgctggatatgattgccgtagctactccaatcaccgcctgcttcatccgccttgccaacctgatgaactccgaaatcatcggcaaaccgtctgatgtgccctgggcattcgttttcgaacgtgtagatatgctcccccgtcatccgggacagctctacgaagccattgcttatcttatcctgttcttcatcatgatttacctgtataagaattacagcaagaaactgcaccgtggcttcttcttcgggctctgcctgacttacatcttcaccttccgctttttcatcgaattcctaaaagaaaatcaggaagattttgaaaacagcatgatgttcaatatgggacaatggttaagcgttccgtttatcataataggcgtctatttcatgttcttctatgacaagaagaaaaataaaatagcctaaatcaaaaaaagagggattagcggttcaaacatcactaatccctcttttttatcaataaaacaaatgccatttccctaatgtcaggacaacaatcgaaaacatatcctaagacattatatacattttcagcttatttccccctgactatcttctttatatcattcagtttattcagcgcttcaataggagtaagattattcacatcaagattcaatatctcatcgcgaatctgacagagaatcggatcgtccaactggaagaagcttaactgcatacctccacgattctcgctcacttctgccaacggtttacctgctatgccctgttggcgattatcagattcaagctgtttcaatatctcatttgcacgtttcacaatgcttttcggcataccggccatctttgccacatgaataccgaaagagtgttcactaccgccacgttccagtttacgaaggaagattactttattatcaacttctttcaccgatacattataattcttgatgcgcttgaaagatttctccatctcattcaattcatgataatgcgtagcaaataatgtacgtgcttttgctttcggatgttcatggatatactctacaattgcccaggcaatggaaataccatcataagtagaagtaccacgacccaattcgtcaaataataccagactccgggaagaaacattattcaggatatcagccgcttcattcatctctaccataaatgtagattcaccgactgatatattatcgctcgctcctacacgggtaaatatcttatcaactaaaccgatatgcgcactttccgcaggaacaaacgagccgatttgagccaatagcgtaatcaacgccgtctgacgcaagagtgccgacttaccggccatgttcggacctgtaataataataatctgctgtgtatcgctgtccagcattacatcattggcaatatacttctcacctatcggaagttgtttttctattaccgggtgacgtccctgacgaatatccaatacgtcattatcctcaataatcggacggatataacgattctcacgagccacattggcaaatgacaacagacagtccagacgtgcaatctgattcgcattaatctgtatctgtggaataaactccatcaatgcctgtactaagtccgtatatagctgcgtttccagaatcagaatcttatcttccgctcccaaaatcttttcttcatattcctttagttcctgcgtgatataacgttccgcattaaccagcgtctgtttacgaatccactctttaggaactttatctttatggacattacggacttcgatataataaccgaatacgttattataagccactttcaaactcggaatacccgtctcctcgctctcccgctgctgtatctttagcagataatcttttcctgaataggagatttgccgcaattcatccaagtctgcgttcacaccatcttgaatcactccacctttatttatcagtaaaggaggatcatttttaatctctttggcaatccggtcacgaatagaaatacaaagattcagctgttcgccaatacgattcaaactcgcattatcagcttccatacatgcctgttttatcggctcaatagcttgtaaagctaccttcaactgaacgacttcacggggcgacacacgtcctacagccactttggaaataatacgttccaaatctcctattaaatgcaactgttcttcaatcagttccttaaaatcaggttggcggaagaaatattccactacattcaagcgttcattgatcggtttctcatcctttaagggaaaaaccatccagcgtttcaacagacgagctcccattgggctgatcgttctgtcgatcacattgagcaggctacttccgccatcattcatattaccaatcaactcaaggctacgcaccgtaaacttatccagacggacgtatttatcttcttcaatacgcgccaatgaagtgatgtgaccaatttgcgtatgctgcgtcattgtcaaatactgcaaaatagcaccggaagcaatgatgccattcttcaaatgctccactccgaaacctttcagattcttcgtttcaaagtgtttcagcagtttctcacgggcagtcgtttctgtaaatacccagtcgtccagctcgaatgtgaagaacttgttaccgaaattaccttcaaacatcaggcgtttgccacgttcaaaaagaatttccttaggggcaaagttattcaacagcttgtctatataatcaaaaggcccttctgcagtaaggaattcaccggtagaaatatcgagaaaagcaactccacaggaagcctttccgaaatgaacggcagccaggaagttattttctttatagttcagaacattatcattgatagaaacaccgggagtaaccaattcggtaatgccacgcttcaccagcttcttcgtcattttcgggtcttccagctggtcacagatggcgacacgttttccggcacgaaccagtttcggaaggtaggtatcaagggcatgatgaggaaaacctgccatctcgatagtttttcctttcccattggcacgttttgttagtgtgatccctaaaatttcggctgcaacgatggcatccgtagaatatgtttcataaaagtcaccgcaacgaaacagcatcactgcatccggatgttttgccttcaaatccagaaactgtttcatcatcggggtgaggacaatctcttcttcgttcacgggtgtctccttttcttttttgttgagtatataatgaattatccttgcaaagataacggtttttcggcagagaatcaacggtatgctccgattcaattttcaaaataaatgttgcataccttgaaaaaaggagagtttatttcttaataagtaggggaaaactattaaaacgtgttataaaacatgctatttttcttggataatttgctaatttcccaagagtccgtatctttgcaatgtgtttttcatagtattagatttaaggttaacaaaggttggagcaaggcgttgctcctttttttatgcctatacgcttcgtccctatttgatataaaccagcagaactctctctttttcaatcatcagattcttttggccaacctgaaatcctagagattcggttcagagcagccccacctttaaaaatagattcattccggtgctctaatgaactaaactaaacagtagcttccaatagccagtaagagataacctgttttaatactgtatttagtttttcataatacttaattattaaattaaaaaatacagtattgattaatgcattaaagatgaaccaaagatattttatggtgattaatattctcttaatggcgaaactttacaaaaaaaaatatttgtagaagatagattttaaggttacattaagttttcattaatcaaatcatcctatatttacagcaaatctaattaaaaccatcgaaaaataaaaaaatctgtttatgtacaagagaaaattcattccgttagtactgttaatgattttaatcgtcaatggatgcagcaacaagcaagaggtagtgttaactccggttgactatgtaaatccctatatggggaatatcagtcatttgttagttcctacttacccaactgtccatcttcccaatagtatgctccgcatctatccggaaagagcagattacacctctgataaaataaaaggcttaccggtcattgtcacctcgcatcggggaaagtctgcattcagcctgtctttctatcagggagcagagagcggattacaaccggtatattactattgttatgataatgaagtgataaaaccctattcctattcttcctattttgaagaagaagaggtttccactaaattcgctccttcccaccaggcaggaatctatgaactaagtttccggaaaaacaatgctccatatttaatacttagtaccaccaatggtgagcttaaaactacggagaataccatttccggttatcagaacatagatcatcaaaccaaagtatatgtttatatggagacttccgcactgccggaaaaaacgatgactgtcagcaaagaagaaataaatcacagccacactgccataaaaggcaagaacgtgggtatcgctctcttatattcaacagatataaaaacaatcaaagttcgctacggtatttccttcattgatgaaaagcaagcaaaagccaacctacagcgggaaataaaagattatgatgtggaaaaccagatgaacattgccaaaaacatctggaatcaaacattaaataaaatcaaagtggaaggaatagacgaaaatgcaaaagcaatattctatacttccctctaccggacttacgaacggatgatttgcctttcggaagacaaccgctattacagtgctttcgacaatagtatccacaaagattctgtcccattttataccgacgattggatttgggacacgtatagagcagtccaccccttacgtgttatcatcgaaccacaaatggaagctgacatgattcagtcttttatcagaatggcacagcaaatggaacataactggatgcctacatttcctgaagttacgggagacagccgtagaatgaattccaatcacggtgtagccactgttattgattcatatataaaaggaatccgtaactttgatttatcagctgcttacgaagcctgcaaacttggtattacagaaaaaacgttagccccgtggtcaggcataaagggaggtgaaatcacaaaattctattgggaaaacggatatttaccggcattggcaccgggagaacaagaaacagctgacgaagtacacccatttgaaaaacgccaaccggtagccgtcactctaggtacgtcttacgatgaatggtgtctggcacaaatagccaaacaacttgggtatgagaaagactataactactttctacaagggagtaaaaactatcggaatattttcaatcctgaaacaaaattcttccatcccaaaaatgcaaaaggcgaattcatagaaccctttgattatgccactgccggtggattaggtgctcgtgaagcatacggcgagaataacggttggatataccgatgggatgttccccataatattgctgatttaattgaactgatgggagggaaagaagcattcagaaataatcttgaaacgatgtataacaccccattgggcgaagccaaatatgtattttatgcacaattaccggatcatacgggtaatgtaggtcaattttcaatggctaacgaacccagtatgcacattccttatctgtacaactatataggagagccctggagaactcaaaaaagagtaaggacattgctcgatgaatggtttagaaatgacctgatgggactcccgggcgacgaagatggcggaggaatgtcagcatttgtagtcttctctatgctaggtttctatcctattactcctggtttgcctatttatgtcatcggaactcctatgttcgaaagagcagttattgaaacaggagccggaaaatcattcgaggtcattgcgcacaactattcgccgacaaataaatatatccaatcagccaaattaaatggcaaagattggacccaatcctggttcgaacataaagaactgatgaatggcggcaaactggaatttacaatgggaaacactcccaataagaattgggcggcagacagtgtccccccttcttttgaaatgaataagtaacagaatatgaataaaatattatttgtccttttatcgcttttgacttctctgcaatcatactcccaagagcaaaatgaaaaagaagtttcatttctcttgttaggagatatacactatgatttactggaagatcacgatatggaatggttatccaccaaaccggatgatctgcgccaagttaccaaagaatattcagtattcacgaaaaatacatggccggaattctcccggataatcagcaggcaagttcaaaaacaccagccgtcaataaaagcccttctgcaaatgggggacttgtcagaaggattggccggttctccacaaaaagcaatacagatggctaacagtgcctttaaagctgtcaacaaaatgaatctgaaagtacctttcattatgactaaaggtaatcatgatatcacagggccaggggctaaagaagcttttgaaaaagtatacttacccaatatggcaagattggcaggacatccatccttacagtcagccaattacactactactcttgatgatgtattatttgtctgttatgatccatgggatcggaatccggaagggctacaacaattagaaaagtcactagccggttcgaaagcaacttacaagtttgtcatgttacacgagcctgtgattccggtaaacgaaagatgctggcatgtattccgacaagataatgccaagagggaacaattgctgcaaatcatcgccagtcaacaagcaatcgtactctgtgcacatctgcatctatactccgttgtctgtcgggacactccttggggacctatcgttcagattctcgtcaacagtgtcatcaaagataaaaatatgctgattccgaaaaaggtagttacagactatagtcctgaatttgtaacggcacacccacaatggcaaccttctactctacaacagcgtatggaatggattgataaagaaactccccatatccgttttttcaaacaaatggatttaccgggctacggcatcctttctattgacaaagaaaacaacaaaatgcaattagaatattatgccgcatttggagaaaagccatacgatacagtcaacatatccgaattacttacttctaattaaaaacatattagccatgaatgtaaaatttaaagctcatttatttattttctccttattcttttgctataatctatcagcacaagaaatcgtcaaaggagattttaagaacgaaaatccacaaagttcgtatgttccttcatttgacatggatgctaccgacaaaccggtgaagaatgtcatcttaatgataggagacggcatgggactggcacatatttgttcaggaatgtatgccaatcaaggacagcttactatcactaatttaaaaacatgcggtttcgtcagaacgcaatccgccaacaagtttacaacagattcagctgcttccggaaccgcttactcaaccggaaaaaaaactaaaaacggagcactcggaatggatgaaaataaccaagttattccaaacttaccggagaagttatccggctatggctacatttcaggaattgttaccactgacaatctcgacggagctactcctgctgctttttttgctcaccaaccggagcgtggaatgtctaaagaaatttgggcggatcttcctaacagtaagctgacattcttttctgccggtagttatgaactatttgaaaaacaagcaccaaacgttcaaaaggaaatcaaaaaagagtttaccatcatagaggaaccgaatgacaaagctatcaagaaatctaaaaaactgggatacttacccacaaagagcaaaacagcttctgtaaacgaaaaccggggagatttccttccgtctaccacccaaatggctattgactatctttcgagcaggagtactaacggtttcttcttaatggtagaaggtgcccgaatagataaaagtgcgcacagtaatgattattcggcagttgtccgtgaagtattggactttgacaaggcggtagaagctgctatcagatttgcagaaaaagatggaaatacattagtgattatttcagctgatcatgaaaccggagcattagctttacgtgacggaaacataaaagaaggcaaaatgaaagcaatgtttgtatctaaaggacatacaccaatcatggttccactgtttgcatacggtccacaatccaagctttttggtggtgttcaggaaaacagcgatgttagtaataaaattctccaattactcgctaaataagatataaaacagatctgtcattcaaactgaaataagaaagaatttcttctatatgaaaataagaaattctttcttattttttctctgcctgatagactccaaaaataatgcaacctgctcccaataatgtaatccatgtgatttgttcgtgaagaatgattacggatgccaccattgttaccaacggattgagatagatataattggaggctctaacggttcccaactgtttcaataccacattccagaggacataacaaaccaaggatgccaggacggccaaaaataagagattggataatacaaccggttttaaaagtacatcgaaatcaggttgtaacggatgaagaagaaaggcgggaagtatagtcaatactccataaaagaatattttgcgggtgataaatacagtggggtaccgccctgtcattttctttatcaccaaactataaaatgcccacgacagggcggcaagtaaagtgagcagatcccctaccggagataatttaagtacaaaactaccgttaaagaccaccagtcccaccccgattaaagctaatatggaaccataaatcaaacctttggtggctttttcactcttataaaagagaagggaaagaatggtagtaagcaggggagctgtgcaaatgatgaaagcgacattggatgcttgcgtaattcccaaagctgtattctctgtaaagaaatagagtgaaccaccgaagaaacctcctgccatcaaccaaagttcgtctttccaattacccgcaaacagacgtttgggagaaatcacccaaatacccagataagcaatgagaaaacgatagaagaatatctcctgtggggtcagtccgtgattaatcaatactttggttgatatgaaagtcaatccccagatagcaactacaagtatcgcaatcagatggtaatatccatgcttcaattccataatggtggtgatgtttgtttaatagagtgcaaagatagcgagaagttatggaatgtttgtttggagaagtaacaaaaagcccgtacctttgtttatgttcaaagaaagctcctaaaataaggtataagttatggaaaaatatatagcaccggacagaaaacgtatcccatacggcatgatgaactttgcagtaatccgccgcgacgactgttattatgtggacaaaacccggtttatacccatgatagaagaagcggacaagtttttcttctttattcgtccgcgccgtttcggcaaaagcctcactgtaaatatgttgcagcactattatgatatacttgccaaggataagttcgaagcgctgtttggcgacctttacatcggaaagcaccctacgcgcgaccggaacagctatctggtactatacctcaacttctccggaatagtaggcgaactgcacaactatcgcaaggggctggacgcgcattgccaaacaatgttcgactatttctgtgacatttacgccgactatctccccaaaggcatcaaggaagaactcgacaaaaaagaaggagctgtcgaacaatttgaatacctgttcacagaatgtaataagaccaaccaacgtatttacctctttatcgacgaatacgaccatttcaccaatgctatcctctcggatatagaaagcctgcaccgctatacggacgaaacacatggcgaaggttatctgcgcgcttttttcaataaaatcaaagccggaacctattccagcatcgagcgttgtttcatcaccggcgtaagccccgtgacaatggacgacctcacaagtggtttcaatatcggaaccaactactcgctcacaccggaattcaacgagatgataggtttcacggaagaagaagtgcgccaaatgctcacttattattccaccaccagtccattcaaccacagtgtggacgaattgatagaaataatgaaaccttggtatgacaactactgctttgcggaagaatgttatggtgaaaccactatgtacaactctaatatggtactctacttcgtcaagaattatattcaacgaggcaaagccccccgggatatggtagaagacaatatccgtatcgactacgaaaaattacgtatgctcatccggaaggacaaagagtttgcccatgatgcctccatcatacagacattggtgagcgaaggctacgtcaccggagaactgaaaaaaggttttcctgctgtcaatatcaccaaccccgacaactttgtgagcctgctctactatttcggtatgctcaccattagcggcacgtataaaggaaagaccaaactcaccatccctaatcaggtagtccgcgaacaaatctacacttatctgctaagtacctataacgaagccgaactcaatttcagtagttacgaaaaaaacgaacttgccagtgctcttgcctacgatggcgactggaaagcctatttcggttatattgccgactgcctgaaacgctacacttcccagcgagacaagcagaaaggtgaattttttgtccacggctttacgcttgccatgacggcacaaaaccgtttctaccgtcccatttccgaacaggacacacaggcaggttatgtcgatattttcctctgtccgctactggatatctattcagacatgaagcacagctacattgtggaactgaagtatgccaagtataaagatcccgaaaaccgcgtggaagaactgcgacaggaagctattgaccaagccaatcgctatgctgacactgatacggtgaagagagcagtcggcactacacagcttcataagattgtggtggtgtacaaaggaatggatatgccgatatgcgaagaggtttaatacaaaaaaggcactcgcattacaagcgcattatgcaaaaaacagataggctaacaatatgaaaagatcaataaaacgtttgcccaaacgcacgcaagaagagttggcggtgttgcaagagctgatattgtcgaatcttacgaatgtgcgtatgattatcttgtatggaagttatgcgcggggaaaatatgtcatctgggatgaaacatacgacgaacgtggagtaactacttactaccaaagtgatttggatattctggtgatatgtgatacgagagacgcaaataaagcagagaggcatgcgcgcgaggtgatcgttcctaaatatgatacaagaatggaaggaaagcggcatccggcaccgcctaatattattgtagaaactccagtgaccattaatagagctataagaagaaagcattatttcttttatgaaattataaaagacggaattctattgtatgacaatggtacgtttcagattggtaaacctgagaagttgccgtatcgggagattaagcaatatgcagaggaagaatatgaagaatgtttctacatgggagaatgttttctagattcggggcatactgcttacgaaaaaggtaattttaaatatggctctttcttattacatcaagcctgcgaacgttactacaaaacgtttactcttgtgtatagcggtattcgccctaaatctcatgaattgaaagtactgggagcgatggtcagaagctgttcacgaggatttgctaatgtgtttcctaccaatactcccgaagaaaataaagcgtttgataaattatgcagggcatatatcgaagcgcgatacaaccggctgttcaccgttaacaaagaggaatacgagtatatgctggcacgaacagaggtgctgcgcgaagtgactatccgggaatgtgctgcacgcatgacatattacgacgagatgatagaaaaagaagagaaagacaagatataaccatatattataaaaatgaagaattaccctcatcacagctatctgtaatgagggtaatcacgttaaaagagagtttcgatacatctccttactatcaaattcttatatgaagaactatttggtcaccttgtaagttccacttccatactcctttgacttcatctctctgggaagggttacggtagcggtaacacccttaggaatggtgaattcccaaatccaggtatctccttcgtatttccaggcgctcttgatgagtccggcagcggaacgatattcggcagttacgtgtcccaatcgcttgtctggaatgggcttcataatgatatgcttgaagccgggagtagcaggatcggctgcaatgccggcaacggtttcccaaatccattcacatacgcatccgtaggcataatgattgaagctgttcatgccgcgcggtcccattcctttgtctatcatatagctgttccaccgttcccaaatggtggtggctccattgtccacagagtatagccagctggggttcttacgttggaagaggagttcataggcaatgtcttccatgccattctccgtgagggtggccatgaggatggatgtgcccaggaatccggtctgcaagcaaagatcgtgctgtgcgaagttttcgcgcaggcggtctatcatcttcgctttggcttcgccttccacaagctggttctttagggcgaacaaggcaggagtttgcatagtgttgaggatggcggttttgaaggtgccgtcctcgttgaggaagttctttttgatgtatgcctttgccgaatcggccatttgctggtacttggcggcatcgcgaccggtggcggcagccatatcccgcatcatgaaagcatctatcacccagtaggaagcgctcaaatagttccaatagctgacggcatcaggaagcgggccttggggagagaaagcgagtccgctacaactttccagtggttcgtagctcaaccagtcagcccattggtagttgccgttctcaccgcagagggtctcgtggttatatttggtgtcgttgatgtggttcataaacaggtccatggcgttgccgggtaggtcaggggcattactgcccctttcccccctcagaaccgtacgtgaaagtttccaatcatacggctcaagcggtgttaaatttctattcaatagaaaccagctcatagttacatctttttagtttgaatgacttttcttctacaactgtcatgcagcaggaaatttactttcttgccgttgactatttgttgggaagttccccaaggatgtttcttgtctatgggtttaccacatacgggacataaatggttctgtctttcccacatgtacagcaacgattttctaccgttgagtgactgtagcatcttgtaagtcttgcgcttttcaaaatactctgtccattcggggtcaaagggatttgcttcaccttttaccttgacatatcgggtaatctttgtgtcatacagccttttcaatgcaatcctgtcatcagtcttgcctttcttgaagtttgccacgaagcaccagttacggttttttacccgtgtgaagtatcggtcggcaatccaatatttgcctttcttggggtgtcgtctcttggcccattgccataacttttcaaatatcaggtagtcagcttttctgaatgtgtcagaagccacacaattcttatagtagtttacccagcctgttatcacaggattcaagagccttataagtgattcctgcttgcttcctttattggaatcaatgattccccggattttctgcatgaatttcttcaggctctttttggatggtttaattagaagtactcctttgtattttcggatattgtacccaagaaagtcaaatccgtcatcaatgtgtgtaatctttgttttctcttccgacagggttaatcccctttctttgagaaagtccactactaacggtttgatttcttccaaagcttccttgcttctacccgtgatgataaaatcatccgcatagcgtacaagatgtactttgggatagtagatcgttttcctgtttacaaatttcttgtgatacttctctgcaagcatagtttgcagtccgtccagtgttatattcgcaagagttggtgaaatgataccgccctgtggagtaccctcttccgtggggaatagctccttgttgaagacgaaaccgcatttgagccatttccgcagcatcactttatccatagggatattgttcagtagccattcatggctgatgtggtcgaaacaacctttgatgtcaccctccataatccattcgggagaagctttctttgcaaggacacaaaaacattgttcccttgcatctccagtacttctctctttacggaaaccgtaggaattactgtccgcagttgtttccgatactggttccagcgcaagcagatacaaagcctgcattgccctgtctttcatcgttggaatacctaaagggcgtaacttaccattgctctttttgatattgaccctctttaatggctggggtttgtagcctcctcttttcagttcgccgattgccttgaatctggctttgggagttgaccattttaccttgtcaacgcctgcggtgtcactgcctctgtttgatgtaacacgttttacggctaaagccttagcgtaaaacgagtgcgttagcacccactgcaaagcttttactctgccgtgtttgccagccttttgagcttttacaatacgcgcttgtagcttattaaccgccatttcacacttgttccagtctatgctttcccaagtgttccatttccggtcagtagatgcacacgatgtttgaatttcgttcatttgcttttctcctttcataagttccataagtttcttgtaaaacaaccaccatgcggaagtctgcccactttcgtgtgaggtgatgtttcaacctctatccgtcccgttacaggatggcgttcgctttttccacattcctctgcccgcactccattcggcttcacttacggtctgcttacctgctgttacacaggagaagtacgggtttaccatgtttcttgtatatgacaaatgaatgggttagaatccgtctatccgccgacagtctttatatccgtgtaattccatgctggagggaattatctgactgcgtcccttttgggttagagcccagtatcattggcggctcattcgaagttacgacgtttatcaacggttcacattacattattcataccattcagcctagctcccatgccattcgatactaacggcagttgtcatcccctcgcggttcagacttctcctttaggaagggctacgttgttggttctgttgacgcacgagttcattacttaatgtcgcacgttcccataggctactgttgacggaacaacaggtttaatcattctatttccaactcgtggaattgaacgtcaaacaatcatatacaaaacttacatgtcacagccagctctcctcaataatttgcgtatcaccgaattgcttccataccgtccaaggcacgatgattccggcatcggcccaacccaaacgcattttctcatcaccgtattgtgccaagggagccactccggggaatccgcccaaactgttttgggtgtcgcgcatgtcacgcatccacttgtggaagaacttcatggtgttagcaaagaacgtaccggtttcggcaaacacttgtgtgtctgctgtccagcccaggcgctcgtcgcgctgcggacagtcggtaggtattgagaggtagttggatagctgcccccaataggtgttggaaatgagcttgttcacaaggtcgttacctgtggtgatagtgccggtttccattttctttgtgatggaagtaacggggatggacttcaacgacttgatagagacatttccggtggcagttatggagacgtagcggtagccgaagaaggtgcaatgagggtagtaggtcacataattatctccggcagcaaaggtgtaatccagacgaataccggtgtgggggatgcgcaggttttcgcgatggcaacttccttccggaccgtccatgccacgaatcttagcaccgttgccgtcattgagcaactctgcgggaaggcaggtcaacactgttccctcggcagctttgaatacgaaagagggtacaccggcacagttttgcccgaagtccaccactaacgtctctcccggacttacggtcatctccgtacccgatgcgaactcacgggcgataattaccttaccgaactcgttctctttcgctccttctatattcttccaaatatatgctctgataggagcaagagcaagatctgtacgcagatagacttccgctccgtctgaaggcaggatgtcgccggagaattctgtattctcttcgggggtggaaagtttgtccacacattcgtagcccatccgttcgcgtgcatcgtactcttctccgtcaaagatgccggcatgtttcaccgggccggcaattccggctttccagtttttaaggtcagtaccgtaacgctttttggttccgtcagaaaaagttagttccagtacaccacggaaggcacatttcttgcctatcatgccgtcatatcctccgggagttatgattttgtcaccccaccatcctggcgtcacctgtacggaaagcatgttctcggcgtttggcttggtacggatgatgtctgtaatatcataggtgaaagaacgtttggtcttggcatagtgtgtgaagcccggtttcagaaattccccgcctacaggtttcccattcacatacaactcgtaaactcccagtccagcggtcatccacttggcggagactattttctgttcatttttcacggtagacacgaaccaactggcaccatcagctgcgcgaccgttgttatgtcctttcactacaggggcgtctactgctgaaatccatttggattcgttccaggctgatgcttccaatgggtcagtacgttttccgacttcggttgcgtttatcagtccgctattcaagaaaagcgcgagaatcattatcgggataagattctcaaaacaatggaaattcattttcatacttatatgtattttttagtattaaaagattaacttggaaatgctgttttagttttacagggctttcacaacaaaattacagaattatatgatatgacagacgatttctgcattttttttgactcaatgctggtttctattcaatccggaactgactcataagtccgatctgattgaacagacgacaggaactttgtacattgaatgatcgattatcaagcaaaacaatgatatattgtaaaataatataatcaatacaatcattcagcctattgtacctattatttaccaaataagaaaagaagatgccagttattcattgcaatcattctttcttctttacacaaaaacctcgaaatcgaataaactctattcaagtttttaataaataacgaaggggtttattataaacggtatccaagtttattataaactcttttttgacactttcaatatttgaaatagaattattgcaacaaaaatgggcaagaaccttcacagtttcttgcccattcgttatcctcgttatgcaattttgcacattaacctattgaactttatgtaataaaatttatatatttcattgttatttctttattttattgacctcaaatatacaaaataaaaagaagaaagtcaatagggaaagcgtggttatctgaaaataaacacgtaaatttgtgcctcgaattagaaataacagtataaatcactataaataaaaactttatcactatggagtacaatttcagagaaattgaaaagaagtggcagaaaaggtgggtagaagagaaaacctaccaagttacggaagatgattcgaagcaaaaattttatgtactaaacatgtttccttatccatcaggagccggcctacacgtaggtcatccgctgggatacattgcttcggatatttacgcccgttacaaacgactgcaaggcttcaatgtactcaacccgatgggatatgacgcttacggtctgccggcagaacaatatgctatccaaaccggacagcatcctgccatcactaccgtcaacaatatcaaccgctatcgcgagcagttggacaaaataggtttctctttcgactggaaccgtgaaatccgtacttgcgacccggaatattatcactggacgcaatgggccttccaaaaaatgttcaacagctattattgtaacgatgaacagcaagcccgtcctatcgaagaactggaaaaagccttcgccatctacggaaacaaaggactgaacgccgcttgcagcgaagaaatcagtttcactgccgaagaatggaacgccaaaagcgaaaaagaaaagcaggaaatcctgatgaactatcgtatcgcttatctgggtgaaacaatggtaaactggtgtgccgaattaggaactgtactggctaacgacgaggtagtagacggagtcagcgaacgtggcggttttcctgttatccagaagaaaatgcgccaatggtgtttgcgtgtatctgcgtatgcacaacgcttgcttgatggattggacacgatcgaatggacagattctctgaaagaaacccaaagaaactggatcggacgttcggaaggtgctgaagtgcaattcaaagtaaaagacagtgacctcgaattcacaattttcaccactcgtgcagataccatgttcggtgttacttttatggtattagctccggaaagtgaattggtggcacaattaacgactcctgaacaaaaagcagaagtagacgcttacctcgaccgtaccaaaaaacgtacggaacgtgaacgcattgccgaccgtagcgttaccggtgtattcagtggttcgtatgccatcaatccgttcacaggtgaagcagtacccgtatggatcagcgattacgtactggccggatacggaacaggagctattatggctgtacctgctcatgatagccgcgactatgcatttgccaaacatttcggattagaaatccgtccgttggtagaaggttgtgatgttagcgaagaaagtttcgatgcaaaagaaggtatcgtgtgtaactctccgcgtccggatgtcactccttactgtgatctttcactgaacggactgactatcaaagaagcgatagaaacgaccaagaaatatgtaaaagaccacaatctgggccgtgtgaaagtgaactaccgtctgcgtgacgctatcttctcccgccagcgttactggggtgagccgttccctgtttactacaaagacggaatgccttatatgatcgacgaagccagcctgccgcttgaacttccggaagtcgctaaattcctgcctaccgaaacaggtgaacctccattaggacacgcaactaaatgggcttgggatacagtaaacaaatgtgtcgtagaaaatgagaagattgaccatgtaaccgtcttcccgctggaactgaacaccatgccgggattcgccggttcttcggcttattatctccgctacatggacccgcataatcatcaggcattagttgatccgaaaattgaccagtactggaaaaatgtagacctatatgtaggtggtaccgaacatgcaacagggcacttgatttattctcgtttttggaataaattcctgtatgacatgggtgtgtctgtaatggaagaacccttccaaaagttagtaaaccaaggaatgattcaaggccgcagcaactttgtatatcgtatcaaagacaccaatactttcgtttcactgaacctgaaagatcagtacgaagttacccctattcacgtagacgtaaatatcgtatctaatgatattttggatttggaagcattcaaagcatggcgtcctgaatataaaacagccgaatttatcctcgaagacggaaaatatgtctgcggatgggcagttgaaaagatgagtaaatctatgttcaatgtagtcaatccggatatgattgttgagaaatacggtgcagatacacttcgtatgtatgaaatgttcctcggcccggtagaacagtctaaaccgtgggatacaaacggaatcgacggtgtacaccgttttatccgtaaattctggtcgttgttctacagccgtacggacgaatatctggtaacggacgaacctgcaacaaaagaagaattgaagagccttcataaattaatcaagaaggtgactggtgatattgaacagttctcttacaatacatctatcagcgcattcatgatttgtgtaaacgaactcttcaacctgaaatgcagcaaaaaagagattctggaacagctcgttatcactctcgctcctttcgctccgcatgtctgcgaagagttgtgggatgtattgggacacgaaacttccgtatgcgacgcccaatggcctgcatacaacgaagaatatctgaaagaagatactatcaactataccatctctttcaacggaaaggcacgtttcaatatggaatttgcagcagatgaagcttcggacgctatccaagccgcagtattggcagacgaacgttcacagaagtggattgatggcaagactccgaaaaagatcattgtcgttccgaaaaagattgtaaacgttgtaatttaaagtattaagtataaaacaataagtattaagtaataagtattatccgtagtcgttttccaaatatatccgtcaggttaatacttattacctaatacttgaacttaaaatccatgcataaactgacaaaagcggaaataatgagagaagtgaaagattacatctatatcactctcggattgataagctattctttgggatgggctgcattcctgttaccttatcagataactaccggaggaactaccggtatcggagctattatctattatgcaacaggatttccaattcagtggtcatactttattatcaatgcagttctgatgacgtttgccatccggatattgggtccgaaattcagtataaaaacgacttatgctatttttacgctgacttttctgctttggttattccagttagtggtgaacaattacgtagaagcaccggatatgacgccggacggtaagccgctattgctcggtacaggacaggattttatggcctgtattattggtgcagccatgtgcggtgtaggcctcggtatcactttcaactacaatggaagtacgggtggaacagatattatcgcagccatcgtcaataaatacaaagatgtatcgcttggacgaatgattatgatttgtgatgtattcattatcagttcctgttactttatatttcatgattggcgccgggttattttcggttttgtcaccctatttattattggtgttgtgctcgactggattatcaacagtgcccgtcaatcggttcaatttttcatcttctccaagaaatatgatgaaatagccgaccgtatcattaaagacgccgaccggggagtaacggtactcgacggtacgggatggtacagtaaaaccaatgtgaaagtgttggtagtacttgccaagaaacgtcagtcactcgaaattttccgtttggtaaaacgcattgatccgaatgcttttatctctcaaagttccgttatcggtgtgtatggcgaaggattcgataagctgaaagtgaaataataaccggttgataagtagtgaacaaccctgttaaaacaaaaaataagatgatgaaacgcaaacttgtatttgctaccaataatgctcataaactggaagaagtggccgctatcctgggagatcaagtagaattattaagtctcaatgatatcggttgccaagcggatattcccgaaactgctgaaacactggaaggaaatgcgttattaaaatcttcctatatctacaaaaactatcatctggattgttttgccgatgatacgggattggaagtggaagccttgaacggagctcccggagtctattccgcccgctatgcaggaggtgaaggacacgacgcccaggcaaatatgctcaaacttcttcacgaactggacggaaaagaaaaccgtaaagcacaattccgcaccgctatttcgttgatattggacggaaaggaatatttctttgaaggagtgataaaaggcgaaataatcaaagaaaaacgtggtgattccggatttggctacgaccctatatttaagcctgaaggttacgaccagacttttgccgaattgggaaatgatatcaagaaccaaatcagccatcgtgcactggctgtacagaaactttgtgagtttctgcaaagctaattatacatacccacttaaaatataaaacacaatgaagaaaattactttatttactttacttacgttattgttatatacttcatgtgtaacaaaaaagaagttcatgcaggcggaaatggcagctactataagcaaagatagcttgcaaggattattgaccgactgccgcaatacaaacgcgcaaatgtcggcacaaatcaagaatcttttgcgtgataccaccaaaatgggaaacagtatccgtcagtatcaaagtatgctgaacatgaatatgaccgaacaggaaaagctgaatgccctgttgagccagaagaaaaacgagcttaacgaaagagaacgtaccatcaatgagttgcaggatatgattaaagcgcaaaacgataaagtacagaatcttttgagcaatgtaaaagatgccttacttggtttcagtaccgacgagctgaccgttcgtgagaaagacggaaaagtatatgtagctatgtccgataaactattattccaatcaggaagtgcccgcctggataaacgcggagaagaagctctcggtaaactggctgaagtactaaacaagcagacggacattgatgtatttattgaaggtcatacggataacaaaccaatcaatactgtacaattcaaagataactgggatttaagtgtgatccgtgccacttccgtagttcgtatcctcatcaagaattacaatgtgaatcctttgcagattcagcctagtggtcgcggtgaatatatgcctgtggatgataacgaaacagccgaaggcagaagtaagaaccgccgtacggagattatcatggctccgaaactggataagttgttccagatgcttcaaagttcggaaggacaaaactaagaatttcatattgaaaaaaggaagatgcagattcaaaacgctgtatcttccctttgctttctactattcaacgaaataattttatccttatctcgatatcaactttatacgtgtaatcaaaatgaaaaaaaatacatattttcttttcaccaagatagtggcactcgtaatgatgttaggtattgcagtgaattgtgtcgctttttctacacttccggaatcagagcttgtctggaagaatgtttccggcatcggaaagaaaatgtctgtatattgcatttttactgacagtagggggatagtatggttagggacaaataatggcttattcttctacgacggcgtgacgactcacgcagtaagtgagacggaaataggaagaaatcctatatactccattattgaaaatgacggcgtattattgttgggtacgaataaggggcttatgacgttttccttttacagaaacacactcgaatattatacaactgattctcccaaagaaataagatgtatgctgttgattgatgacatactttgggttggtagcatatacggaatgtatactttcaatctaaatacaaaagaaatcaaaaatgtttctgaaggattgccgcacaagtcagtatattcaattctaagagattgtagaggaatattatatgcagggacgtatgacggtctcgcaagatgggactcgagtgataaagtattcaaggaagtgaatattccggaatatgagaaaacctcaaacaatctgtttgtcaactgtttgctcgaaacgtctgaccaccaatatatttatgtaggaaccgagggaacattgtactgctacactcctatgacaggggcttgggagaaaaatgcccatgtgaatggaaacaacatcaagagcctcacacaatcagacaacgggcaccttctcgttggaaccgacaatggcgtatttgatctttccggtaataacgtcaaacaatacttccacgactcgcgacaagaacagacgctttcaaacaatgaaatatggtgtattcattccgataatacaaataatgtatgggtaggacatgaggtaggattttccatagcttcaagttctaatgccatacgtattgtcaagttaagtactctcactctttcaggcgaaggaaacgacatacattcaatttatagagacaggcaaggagttttgtggatcagtggaaccaatggcattataaaacttgctgaaaacgaaccggcaaagtggtatcgaccttcgaaaaagccacattccctatcccacaatcacataagggctataaaggaggattctgacgggaatatctggtttgccactgatggaggactaaatcgctacaacgccgtggcagacaattttgatgtattccacatagtcgacaaagagggcaaacattcttcaaactgggtttatgccttagaggaagacggtgccaattatatgattggcagctatctgggaggactccattatgtgtcaaaatccaagttcgattcttcgggcggggtaattgtctccgacaattcgattaatgtcagctcaccgatttttaagaatctgaatttaaagttgaataatgaccttataaataaggttataaaagatccttccggcaatatttggatattgtgcttcagcgataacatattgacggaagttacgcccgacggacgtgtagaaagatacaatatagaagagatgactggtaattatcccactcttcttgctctggatgaacaaggaagattatggtgtgcctttaaaggcggtgcagttgtcttcaataaggacaattcccatcatattatcaaattcccaaaaaccgatggcgatgaaagcatattggctattggaaaagttggagagggcatgtggatatcgactgtgaccaatgtatggaacatcgatggcaaaacctttgaggtaaatctcttgccgataccgcaaaagtcgtataaatccatcttcgccgattctgtaacccaaaaagtttatttaggtggaattgatgagattaccgaagttgacccccgtatcatagatgatgggactgataaggcaaagattaagatgattctgacaagtgtgaatgacgatatttttgatttgtcccggctgaatcccgaagagaaaggattgactattccctacggtggaaatttgacgcttgttgtcagcaatctcgactattctcccgatgcattgcaacggtatatatataagttagccaaatctcagactgataccatcggcagatggattataatgcctgaagatttcaataccatttcgttgtccgaactgaagatgggcgactatttcatactgctgaaaacagtgggtacgttggggcctgcattttcattgccgttgaacgtacaagcgccctggcctctgtcctggtgggctttctgcctgtatttcttaatgattctcgccattatagcgtgtgtcatattatatatgcgtaaacgcaatgcccgacttattcaggaagaggacagacgcaaatcccttgagaatgtagaacgaaaactgactttcctttccagcatctctcatgacctgaagacaccgctttcaatgattatggggccggtaagcgtgctcaaagaaaaagtgaaggacaaagaaatgctgaaaagtctcgaaactgtctatgaaaatgctgtcaagctaaacaatatgatacaccgtacgcttgaaatcaatcacttggaagacgggggagaaaacttattgatactttctacattcaatgcagttgatttctgcaaaagcatttttgaaacattcaaggagaatcatccgcaaaagaaattcgtattccattcctcggtgccccagcttttaatagaagctgatgcagttaagtttgaatctatcatcaccaatcttatgtcaaatgcctgcaagtattctgaagatgattctaccatctcatgcggcataagccgtgttgaccggaatattcatatcgtggtgtcggatgacggcatcggtatagccgaaatagaccagcctctgatattccaacgtatgttccgtgcaccttctacatccaagatgcgtgagggtaccggtatcggtctgtaccttatcaaaaaatacatcgaactgatgaaaggcaagattgagctttacagtgaaaaaggtcaaggcacatcgttcattgttaccttacctttgtcagagaaatccataatcgagcataatacagatatggataatgctgattataagaaacccaaaattctgatagtcgaagataaccggcaaatatcagagttcatatatgatttgttaaagaaggactatatatgcttgtcggcggaaaatggacgcgccggactctctatcgcgcaatctttcattcccgatttgattatatcggacgaattgatgcctgtaatgaaaggattggaaatgatacaacgcttaaaacaaaatacccgtctggcgaatatacctattataatgcttaccgcaaaaacagataatagtacggagaatgaaagcgtcaaactaggtattgacatctttatgtcgaaaccttttgaaccttcagtgttattgggcagggtcaagcatctgctgcaatcgcgcgccaagttgcaagaggccattcgtatcgaggccattaccgaggtaaaacccattgaggcggagtctgtgtcggaaaaacaactggccaggatttcaaaagtcatagaagataacatttccgacccggatctgaatgtcaattttgtctgtgagaagtgtgagatgcccaataaacagttgtatcgtatcattaaaaaatacatgggggtcgggcctctggattatatccgcaatgtaagacttcagaaagccgccatgctattaagccagaaaagatttaccgtgtccgaaatctgctatatggtgggatttaaaacgccgtcatattttgccaaatgtttccaggaacggtttggtgtgaaaccgagccagtaccagtctgatgacaaatccgtgatatgatttcagacataaatatcaaatatttcgtttaatcggcgtgatgtctgaactgttgcatcaattgtccgattattgacccgaatcctttttttaatcacatacctttgttcccagaagtagatatcgaatggattatcccccgtttgatagccttaaattattttattaattaatatcatgttgatctatggttaatgcttatggagcttccgaggtaaagacttggttaatgggagtattattctcaatactactgttgcccgcttcggtatacgctcaaacacaaaggacggttacgggcaccgtcgtcgatgaaatgggagaatctattattggagcttctgtcaaagttgccaatgctcctgttggagtaatcactgattttgatggcaaatttacgctaaaggttccttccaagaccaaacaacttatcatttcctatgtaggatatattacgcagacggtcgacatcacatctgatgtgattcatgtgaaaatgcgaaccgacaaccagcttctcgaagaagtggtcgtagttggttatggtgtgacccgcaagagtgacttgaccggttctgtcagtacagtaaaggctgatgatttcaatggaggtatcgtcaattctgccgaacagctcattaacggtaaagtatcaggtgtccaaattatgagttcaggaggttccccgtcagcaggcaacacaatccgtattcgtggcggagcatctctgaatgcttccaacgaccctcttattgttgtcgacggtgtgcctcttgaaagcggcggaatcaccggtagcggtaactttatgagtatgattaatcctgcggacattgaaagcatgaccgtgctaaaggatgcttcgtcgacagccatttacggttcgcgcgcatcaaacggtgtattgcttatcacgacaaagaagggtggaaaagaccgcttaaaggtcagcttcgtaaccaacaattcactttcaacaaagaccaaagtcagcgatgtgctcgatgccgaccagtttaaatccgttatcacgacacaaggtaccaatactcaaaaatcactgcttggagatgctaggactaactggactgatgaaatcttccacaccgcctttgctaccgataataatgtcagcgtatccggccgggtcggaatgttgcctttccgtgtgtcagttggttatttaaaccaggaaggtatccttcaatcagacagagtggaacgttacacgggtagccttgtccttaatccttcattttttgacgaccatctgaaactcacgcttaacgccaaagggtctgtaagcgaaacccgttttgccgattccggtgcgatctatggcgcggcttcattcaatccgaccatgcctgtccattctgcgaacgggtcattcggtggttattttgaatctgtcagcccgggcggtgttcccgacgcgacgctcaatcctgtaggcagacttgattacatcagtcacaaagcagaggtcaagcgtatgatcggcaactttgacgtcgactacaaattccacttcctgcccgagctgaaagctcatgtttcactcggtcttgactatgctgaagggtggggtgtttattactgtccggaaggtgtaggcctgaactatgaaattggaggtacaaacaacaaatatggccctcagaccaatacgaataaactttttaccgcttatctcaattacaataagaacatcgagagcatcaagagcaactttgatatcacagccggttacgactaccaatattggaagtccaaaactgcagaatatgatgaatataacgtatatggagaagtacagaagtctgttgcccctacagatcagcgtcacttattaatatcatggtatggccgcttgaattactcatttgacagccgctacctgttgacggcgaccatgcgttccgatggtacatcaagattttctcctgataaccgctggggttattttccatcggtcggtcttggctggagagttgacgaggaaaagttcatgaaaggaatttcatggttagacaatctcaaattgcgtgtaagctatggtgagacgggtcagcaggatattaataacaattatggctacatgccggtatacaacatcagtaatcccggagcatactatcttatggggggcgaatatatccccatgtatcgtcctcaaggctatatcggtgacttgaaatgggagacaaccacctcatggaattatggttttgatttttctgtattggacaaccgccttagcggtagctttgattactatacccgcaagaccaaagatttgctggctgaagtgccggttccggcaggcgccaattttaactcgcgcatgactaccaatgtaggcaatgttgatagcaggggagtggaattaaacataaatgcgactcctattgccactaaagacttcaactgggatgtaagtttcaacgctacatggcagaccatgaaggttaagaatctgtcgcttgctcccggaacaacgaccgtaaatacactcacaggacctactttcgactcttattccatacaagtgctttccgagggttatgaaccatatatgttctatctctaccatcaactttatgatgataacggcaagcctattgaaggaatgtatgctgatatcaccggtgatggcgtgattgacaataatgaccgctatcgctgcaagtctcctactccggattggattctcggcttcagtaccaacctgacatggaaaaagtggactttgggcttcggtttacgagccaatatcggcaactatgtttataacggcaatgctatgaatatgggtgcctgggagactgtaagtttcaacacataccagatcaataatctcaaccgcagttatcttgaaaccggattccagcatcggcagcggttatccgattattatttggagaatgcctcgttccttaagatggacaacatttcactccgctacacattcggtaaactcgcttcctggtgcagtaacctatacgtaagcgcaatgatacagaatgtatttaccataacaaaatacagcggcgttgatccggaagtgcccaatggatgcgacaattcgttctatccacgcccgcgtacctattcagtttctgtcggtatcgacttttaattattcacaatcatagataaattgattatacaatgaaaacttcaaaatatatcacagggttgctgatggcaataatgatgagtgttgtgagtagctgcttcgatgatcttgaccaatatcctcatattgagcagactcccaaggatatctatacctcagtccccaattataggcaagtacttgccaaactttatggctcgtatgtccttgcaggtcaggataagggcggtggtaacaccgatatcagcggcagccgcggattcgactatatgcgttgctatttcaatttgcaggaaatcgggactgacgagacggctatgctttcgtatgcttctgacaatcagaccggacttacattcctttcatgggattccaatgacgtatgggtttacgacacttattaccggatctattataccatagcactttgtaatgagtttatccgttattcgagtgacgacgctttagctaaatttagcgaggatgaacaggttgaactccggaaaatgaaagcagaagcacgcttcctgcgctcactcgcttattcccatgcgcttgacctttttcgggatataccctttgtggatgagaattctcctgtcggaactttccttccacccaaatacaccgcacaacagatatttgactttatagttcgggagcttgaagaagtatcccgtcagcttccggatcatcccgaatatccacgcgccggcgcagctgccgcctatggtattttggcacgggtttatctcaatgcagaaacttatggctgtggcaatcactatgatgactgtgtgaaagcctgcaagtcgctgattgacttgggttatgatacgcttgaaccgaaattcaccagacttttcggtgccgacaaccacaaatgcaccaatgaaattctttttgcattcgctgtagacaacgaacaaagcgtatcatggggcgcaagtacctatatcgtctgtgcgcaaacaagctcattgtacggtgcggaaatgggtgtcgggacacaatcttggggaatgttccgttgtcgtagccagattcctccgctttacgagacaaatgacaagcgcaatcttttctacactaccgaccgtgatccgaaaatcaccgatgtcggtgacgaaaacgtcggctatttctataagaaatggaacaacttgactgatgaaggaaaggcacctgccaagaccactgacggtgtttgtaccgaccttcccatcatacgcttggctgatgtatatctgatgcttgccgagtcgtatctgcgtggtgcaacaaacattacattaacagaggctttaggttacgtaaacaaagtaagagaacgggcctttggcaattctaccggcaatatccaggccgtagaccttacactcgacttcattcttgatgaacgagcacgggaattatcgatagagatggtcagacgcacagatcttgtccgttttgaccgctttactaccgacaaatatctttgggactttaaaggcggccagcctgacggtacggcagtggatagcaaatataacatctatcccataccttatgctgaacaaaccgccaatccaaacatgaaacaagattattaaaaccatagtatccaatgaaagcattatataaattcttaacggcagccgttatggccggaagttttgcttcctgttcaacggatatcgagatgccgaaactccagggatttgacaaccttgatcctagggaactcatcgcatcgacaaacgaagtggtaatggaaggagtgaacgaaagtaacgaagcggtgacacttacatggggagattatcaactatccgtcgataacccttcttatgccgttccggatggaagcgtcaagaactatctggaaatgtcaccaacttcagacttttcactcattgaattcgtgtcagtggaaggccttacgaaaacttttacagagaaggaattaaacccgattcttatccgtctcggctatcaaccctggcagaaagcacctttacatatcagagtgagatatgtagttgccgaaaatgtcgcatatcagtatagtatgcctattgaaatcaacgtatcgccttatggcctacgtatgaatcgaatggatgtactcgctacagacaagacaacggtattggcagccctttattcactgtcagaaaatggcatctatacagggtatgtagctgcttccggttggatgaacttctacctccaagaacgcgacaatacgatttggggtagtcaacccggctcagcattcacgatgagtaaagatggagttacattctataatttatggttccccggagatgcaggctcttatcgtgtgactgccgacactaacgcaaaaaaatggactgcagagtatctcaacagcatgacgctcacttcagctgcaggtacgaatactgaaatgaaattcaagcagtctaccaattcatggtcggccaaggtaacaaccaccggagctgaaaccttctctgcaaaagctactaccaagaaatacaacatagagaacgaaggtggtattgatagtgatccgattgacttcggtcagctcctgtcaatttcagaagcaggtaactggattgtaaccattaacatgtcgggagagaatccaactgcgacctatgaagtagacgagactccggtcgtaacatacgatccttatcttgagatgataaacatcgagaatcatagcgatgtgaaatgccgcttgttctcttcgaaaagcaatggtgagtacatgggcttctattacgccggcgaatgggagaattataagtttgcaacagtgggtagagaaactgtttacggttcaaacccgcagtctcttcaagaacttgattcgtcaaataaggcatataatatatatgtggatggtggaaaagaaggtctctacctctactatgtgaatcttcctgaaaactattggaatgcgaaagaaatccagtctttgacggtgttcggagatcatgatttgaagagtgccatgacctatgacaaggaaacgaaagtctggactgcggaattagatattcaagaagtgggatggggtatgcagattctcattgatgaagattggagcaaccatttcaagtctaagggcgacggcgtactcggctatcttgaaggtgacaatattgtacctcccggatccggcaaataccttctgactgtcaacctctatgatatgggtaatatgacttatacctttacagctttataatcaattataaatatacgatcatgaaaagaataaatatagcattactttctgtgattttagctatcaccattacatcttgtctggacgagcatgagttcaaggaacgtccaacggtcgacccgcctgctcctaccgagcatttcgcatcaggtgctgacattagtggagtaacagaatttgaagccaaaggagtgaaattctataacaaagccggggaagaacgcgaatgtacggccctgatgaaagaattggggatgaataccatccgtcttcgtgtattcgtggatcatgctcttgatttgtgcgaaaaggaagatgtacttgtgaaggctaaacgtgtacaggctctcggaatgcgcctgatgatagatttccactatagtgatgattttgctgacccgggaactcaagacatacctgcagcctggatagactacgatttgaatcagatgaaacaagccgtggcagatcatacggtagatgttctttcaacactcaaagagaatggcattgatgtggaatgggtgcaggtcggcaacgagacaaccggcggcatgttatggcctatggggaatgtggataagaatatgggcaactatgctgtcttgacacaggccggttatgatgctgtcaagtcagtttatcccgacgcccaagtgattgttcatctggatcgcggcaatctgctcgatatctatacccgcatattcaacggtttaaagctgaacaatactaaatgggacatcatcggcatgtcgttctatcccgatgccggtgactggcagaagcaaaccgatgcgttgacagacaacatcataaccctgtccgaaaaatacggtactccttgcatggtcgtagagacaggtatgttacgtaatgatcctggtacggcacgggaatactttgaatatcttttcgataaaatgatgaacgataccaaaggatactgtagaggcatcttatattgggaaccggagacttatagggaatcaggctatgataaaggcgctttcagcgacgatggcaagcccacagaagctcttgaaccttttaacatgagtcaatatgaataagaagtgtcagatatggatggctgctgtactggcagccatcacactccccgcatccgcccaacgtacagaaaccaaacttaccgacggatgggaattccgccgggacggacttgaatccgacaagacatggaaggcggtaacaatcccgcatgattgggctatttatggcccgttctcccgtgagaacgacctgcaacacgtcacagtcgaacaaaatggagaaacggaagatacctggaaaacaggacgtaccggcggactccctttcattggcaaaggtgcttataaacgtatcattgaaatacccgacacaacagattgcagctataccctcgtttttgacggcgccatgagcaatgccaatgtaagtattaacggcaagcatgccattgcctggccctatggatataattcattttatacagttatcgattcattgatccgaccgggaaaaaatgaactgattgtagaacttgagaacaaggtaaagcaatcgcgctggtatcccggtgccggactataccggaatgtccaccttgtcaagactgataaaatccatattcccacgtggggtacatacatcactactcccacaataactcccgaatacgcgtccgtcaaacttcagacggagattgacggagccggaaaaggaaagtgggtggacgtcatcaccgagataaagagtccggacggaacagtggtcgctacatccaaaactacttatgtcagccatggtcagcccttgattcagaatttcattgtaaacaatcccattctctggtcgcccgaaaagcctgacctttatacagcatccatccgcctgattgttgaaggaaaaaatgtggatacctatgacacttgttttggaatacgcaagatagaatatattccggagaaaggtttctttttaaacggaaaagtaacaaaattcaagggagtctgcaaccaccacgatctcggcccgctcggtgcagccgtaaacgaagccgctcttcgtcatcaggttgaacttttgaaggatatgggagccaatgcgatacgtaccgctcacaatatgccggcacctgaactcgttaaaatttgcgatgaaatgggtatgatgcttatgattgaaccttttgatgattgggggttccgtccaaagtcagagaatggttatggaaaaatattcaatgactgggccgaatgtgatatcaccaacatgataaagcaatatcgctccaatccgtcagtcgtgatgtggtctatcggtaatgaagtcccttcgcaatgggggcctgatggaatttcagaactgatgatgcttcaagatctgatacatcagcttgaccctacacgccctgtcacatgtggtatggatcagattggcactgtccttgaaaatggttttgctgccgctctcgatattccgggcttcaattataaacctcaacactacgacaaggcttatgagaaacttccgcaaaaaatgatacttggcgccgagacagcatccactttctcttcacgcggcatctattattggcctgttatatatcgcggccaagtattagtatatcatcccgagaatcagagcaacagctatgacaatgaaaatgcatcatggtctaatgttccggatcttgatttcattatggatgatgataaagaatggatgatagggcagtttgtatggactggattcgattaccttggagaaccgactccgtatgatacggacacctggccttcacatagctctgtatttggaatatttgacttggccagtcttccgaaagaccgcttttacctttatagaagcctttggaacaaggaagaccataccctgcatgttctcccccattggaatcttgaaggtcgggaaggtaaaaaggttcctgtttacgtctataccgattatccggaagctgaattgtttgtcaacggtgtgagtcaaggtcgtcaacgcaagttaacccgtaccgaatatgagtcgtcaacagattctcttgctcttcagaaacgttatcgcttgatgtggaatgatgttatatatcagccgggggaagttaaagtaacagcatatgacgagaatggaaatccggcagacgaaaagataatcaagacagccggtaaacctcaccatctcgtactttcgtccaatcgcacttctatgaaggccgacgatgaagatttagtttatataacagttcaagtagctgataaaaatggaaatctggtacctacagatacacgaaaagtaaacttcaaagtttcgggagccggcaaatttcgcgctgctgcaaacggtgaccctacgtgtaccgaactgttccatgaaccggacatgacattgttcagcggtgctttgactgctattatccaaagctctgaagaatccggtaaaatagtttttgaggcttatgcaaagggggttaaacctgcaaaaataattttgaatgtagagtaattagtgtttttttaataggtattgataatgaaatatagttttatgcataagatattttttgctctgattactgttgctaatgtcgtttcggcagcagcaacggtaatcagtccccctgttatccccggtgatgaggatatggaagcagagattaagcgctgtgttgcatcaatgaccattgaagaaaaagtgggtcagatgtgcgaacttacgcttagtgttatcagttcggcagatccgcgttggaatcctacgctcacacttgacaagacgaaactcaatcatgtgatttcccggaagaaagtcggttctattctcaatacggccgatattgccattactcccgagcagtggtatcgtgttgtcaagcaagtacaggatgaatcaatgaaaggtatcggtataccatgtatatatggacttgatatgaatcacggcgcaagctatactatgggggcgacacttttcccgcagaatataaatatggctgccacgttcaacccgaatcttgcatttagtggcggagagattacggcatacgagactcgtgcctgcaatgttccatggacatataatcccactgtcgaccttgcgcgaaatcccctctggccgcgtttctgggagaactatggagaggatgcctacctttcttcggttatggcaactgctactgtcagaggcatgcagggcaccaatcccaataagatagaccgtttccatattgctgccaacattaaacattatatgggctatggatcacctgtcagtggcaaagaccgtacacattcctctatcagtgagcaggagatgcgagaaaaacattttgctccttatctcgaagctatcgttaagggtggcgcattgtcgataatggtcaactcaacgactaacaatggtattccctttcatgccaatgcccgttatcttaaccagtggctgaaagaagaacttgattgggatggacttatcgtgaccgactgggccgatatcaacaacctctatcagcgtgaatatgtagctgccaacaaaaaggaagcgatagccatggccataaatgccggcatagacatggcaatggagccttatgacactgatttctgtgatttgttgattgagtgtgttaatgagggtttagtgccaatgagccgtattgatgatgctgttagtcgtgtgcttcgcatgaaataccggctcaacctcttcaaggtgcctgataccaagtacaccgattatcccaaatttgcaagtaaggagtttgccgatgtatcccggcaagctgctgtcgaatcaatggtactcttgaagaatgatgacaatatacttcctattaaaaaagatatgaaaatactggtcactggcccgaacgctaattccatgcgctgtcttaacggaggatggacttacttatggcaaggccacatgactgatgaacttcccatatcgaagaactacaagactattcttgctgccatgcaggatcgtttcggcaaagataatgttgtctatgaacctggcatgacctatggtcttaccgatcagtgggtcggtaactggggtgtggaacatgtcggggatttcgacaaggttatagctgccaccaaggatattgacattgtcgtagcttgtatcggagaaaccagttactgcgagactcaagggaatatcaacgacctcaacctgtctactaatcagatagatttggtgaaccgcctttatgctacaggtaaacctgttgtattgattctcaacgaaggtcgtccgcggcttattaactctatagttccgggagcaaaggctattgtcaacattatgcttccttccaactatggtggtgaggcacttgcaagcctgttggcaggcgatgagaacttcagtggtcgtctgccgttcacctatcccaagcatcatggagctcttgtcacgtacgattataagaaaggggaagtttcagctactatggccggtgtctacaactacgaagcgactatagatgtacagtggctcttcggctatggccttagttatactactttcaaatactccaacctgtgtgtcaaccgtaaagaattcacccataaggatacgctttctttctcggttgatgtcaccaataccggttctcgtgaaggtatggaaagcgtacttctcttctccagcgatcttgtggctactacttctccggatataagacgcctgcgcgcatttgacaagataagtttgaaacctggcgaaacgaaaacggtgacattagaacttcccgcaagcgaccttgcttacgttggttacgatgaacactggattcttgaagccggcgatttccgtattacaacaggagaccaagctataaacatcaaacaaagccaccgaaacttatcgttggactactccaaatcgttaaaatacagatagaaaatgatgaaaaatattattttaacaatggctgtagctgcattttctacagcatcattggcacaagcgccccagcttcgtaccgacaatatcgatgaaattctcaatgcaatgacactgcgtgagaaggcgacactgctggttggtgagctagctgccaatcagaatgcccaaggtacccaaataggcaatacggagaaatacatccccggtgcggcaggaaacactcatagcattccccgtctgggaataccgcctacggtaatggccgacgggcctgccggtctgcgtatctataccaagcgtaattacgatagtaatacctacaattgtacaggttttcctatcgggacaagtcttgcagcttcttggaatgaagacattgtatatcgtgccactaaagccatgggaaacgaagtactcgaatatggcgtggatgtacttttggctcccggtaacaatatccaacgaaatcctctctgcggccgcaacttcgagtatttctccgaagatcctgtccttagtggaaatatagcagccgcttatatcaatggtattcaaagtaatggtgtaggtacttcactcaagcactacgcttttaataatcaagaaacacgccgtttaggtaatgatgccagagtgtcacaacgggcagctcgcgagatttatcttaaaccatttgaaattgcagtgaaaaaatcacagccatggacagtgatgagttcttacaacaaggttaacggtgagtataccaactcacgtcgtgacctgctcaccgacattcttcgtaacgactggggatacaacggcatagtggtaactgactggggtggatactttgacgcggttaaatgtattactgccggtaatgaccttgtagaaccaggctcacctaaatttatcaatgagatagtggaagctgtggaaaatggcaaactcgaccaaaagtatgttgacgcctgtgtgcgtcgcatgttagcgtatgtcgttaagactccacgcttcaataaatataaattcagcagtaatcccaatctaaaggctcatgctcagatagtgcgtgaagctgctgccgaaggtacagtcttactgaagaacaacgaaaacctgttacctcttactcatacgaaaaatgtagctctcttcggttgcggctcttatagacccattgccggaggtactggttctggtgatgtaaataaggcttatatcgtgtcgcttgtcgaggggatgcgcaatgccggttttaatgttgacaataatctggtgtctgaatataccaaatatctatgggcttacgatgaaaagatggcaaagctggagtggtggcaaagaaatcctgtagccccggaatttattccggatgctttggcagatgctgtcaagaataacgatattgccatcgtcaccatccaacgtcaatcaggtgaaggccgtgaccgtccggcagctgacttcgagcttgatgccgatgataaagcactgcttactcaggtggctgatacgttccacaaggcaggaaagaagattgtggtagtgctcaatgtaggaggagctatagagaccgcttcatggaaagatattcccgatgctatcctgttgccatggcagtgtggacaggaaattggatacagcatcgccgatatgctgacaggcaaggtagcaccgtcaggacatttgcccatgacattacccgagaaattaagtgaccatgcttctacgaaaaatttcccgcttgattctcccgacataagtggatggggcgatgaaaataagaatgaccgtaaaaacatagattatacagaatatgaggaagacatatatgtaggctaccgttggtttgacaagcagagactgaacgtatcttatccattcggatacgggcttacatataccacatttgagtttgagggactaaagttaaacgtaaggaatggggatacacattctgacgataccatagaggttagtgtcaacgttaaaaacataggtgccaccactggcaaacaagttgttcaagtctatgtggttgcccctaaaggaaatcaggacaaaccggaacaggaactgaaaggctttgccaaaacgcgtttattgaaaccgggcgagagtcagttgctcactatctgtattccaaagataaacctggcatccttctatgccaagaaatcagcctggattgttgatggcggcacatacgttttccgtatcggcgataatagtcgcaacatcctttgtgaaggcaaaataaagattaaaaaacaacaggagaaagtcagtgtcagcttataagggattttagtatatgttctctattatccactaagaaatagacaacaatgtttaaaactacaataaaaaaggattatggctttttatcagctataatccttttttattgtaatatctccagataaactaaaatttataatcccaacttagccgaaatctccaacattcgttgaatcggcttcactgccttcttagccacctccggatctactgtaatctccggtgactcattcttcagacactcatagagcttctctaacgtattcaatcgcatgaagctacactcgttacatccacacgtactatcgttcggtggagcagggataaacgtcgtctgcggacacttcttctgcatctcatgcaagatacccgattcggtagccacaatataggtgttttccggatgattcactgcatacttcaacaatgctgccgtagaccctaccacatccgccagtttcaaaaccgtactcttacattcgggatgtgccagcaccaatgcttcgggatgctgcgtcttcaattccacaatcttttcaacagagaactgttcatgcacatgacaggcaccgtcccaaagcaacatattccggttcgtaactgagttgatataattccccagatttcggtccggaccaaagattattttctcatctttggggaagctttccacaatctgcttcgcattggtggaagtcaccaccacatccgttaccgctttcactgcagccgtcgtattgacgtaagaaataacggtgtatcccggatgctctttgacaaactgcgcaaactgatccgccggacaactgtccgccaacgaacaacctgccgccatgtcgggcaccagcactttcttgtccggacaaagcacttttgccgtttcccccataaagtgaacgccacacatcacaataatatccgcttccgttttggctgcccattgagccaatgccaaactgtcgccaacataatcagcgatgtcttgtatttcccccttctggtagtagtgtcccaaaatgattgcattcttttctttctttagctcgttaatagcctttatgagttcattcataataatattcttatttctttccttttaaaaaaatcctttgttagtgatgatagcctgttaataatgttagcaaataaatacgatttttcttgccggataagttattagtccatacttctgttttatgagttggttatgaactgatgtaaaggacaagatattctattctacttgcttcattatcaatgaaagcatcgttaaatgccgtcaaataggagtttgctattaactccctgttgataaagtgcaaagttaaaaactttatggatataaacaggcagataagtgctgaaaaatatgtttatgtctgtgtagaaagttttgggttagttttttggaatgttcataacgaaggcctcttataccttcttttgaataatgcaagaattatttttcaaaatctttgccgatagttttgacaggttttaaaccgttatcaacatcttgttaactgaaaagaattacctttgtggacaagaacataataaaagaaaagacgtatgcgtaaactgaaaataacagaactgaaccgtatcagtgccgaagagtttaaacaggttgaaaaactgcctctagtagtagtgctggacgatattcgtagtttgcacaatataggttctgtgttccgtacttcggatgctttccgtattgaatgtatctatctgtgtggtataacagctaccccgccacaccctgaaatgcataagactgcattgggtgcggagttcactgtcgactggaagtatgttaataacgctgttgatgctgttgataacctcaaaaacgaagggtatatcgtttattctgtagaacaggtggaaggaagcatcatgcttgatgaacttcagctggataaaaccaagaagtacgctatcgtaatgggaaacgaagtgaaaggggtacagcaggaggttattaaccattcggatggctgtatagagattcctcaatacggaacgaaacactctttgaatgtttccgtaactaccggtattgtgatttgggatttgttcaaaaagttacgttaatagctataatacaggattggttaataagttgtttataacgagttaatagcttagttaattcatttataatcaataactatgtattgtttataactatatggagccatgttgattctatgggtattgggtagttattattatagttgttgatagtgcgttttcaggctgttaatacttgagttgtcaggtattaacagcctatatgataagtattaatagctgggaactcaagtattaacttctgagaaaacagaaattaataccttgcaggaagcttgttaattcttgaaatgataactagtagggttgagtagttgataaattggcttataaggttgataaacttataagccgattgattttagatctgtccgttctctaccatcaacaccacacgttccgttagtttgtcttcaccttgcggatcatattctttttttaaactggctccgaacaatgcagcaaaagtctgatagaatcccgctttgaaaggtcccataaatgctttcaccagttcatagctggtagaattgctttggcggtctattaatttaatcaacagttttccctgtgcaaaagaaagtttcttcattcggggagtatattgctctttcaatcctttttcaacccgtttgatatgtttttgacgggctttctcattgggtaatgtctgaagatattcgtaagtttcgatgatggcttggttaatttctctggagataggatatacctttttcacattgcggatcaggcgataatattcctggcgttctttttcattcttgaatttcaacggacggaaaatatacacagttcttaactggacacatggaatggtatctccattgtagatacacatcggaaccaaatatccattgatgctttgtttttcttgagcttgcaggcgcaacgaacaacaaacaatagcaaacagcgtcattactactatgttaagcctccttttcacgatacaaaaatagaattaaaatttttattattcagacatttctcttcgatgttaacctatttaaagtatctttgcggccttatctgttaaaaagcaggaagaataaaccattttattgatgaaaactattcaacttttacggttgataagtattataaacagcctgttaataattcctgcttgtagtgctcaaaacccttctgaaagtcttttagaagatgttcttgaagatttatctgttaataacggaactgataactctgttaatactcctaattgggaaaatgaattggaagaactttccaatcgtatgcaagaaccagtaaatttgaatgttgctacccgtgaacaactcgaacagtttcctttccttagtgatattcagattgaacatctgttggcctacatctatatacatggacagatgaaaaccatctatgaacttcaactggtagaagagatggataagcaaacaatccagtatttactgcctttcgtctgtataaaagctattaacaataaacctgctttccggtggaaaagcctgttgaaaaacgcagcgaagtatggaaagaatgaactgttaactcgctttgatataccattttataagcgaaaaggttatgaacatacctatttaggaccttctgtttataactctgtgaaatacagtttccgatacagtgaccggctctatgcaggagtcgttgctgaaaaagatgctggagaaccttttggagctttacataatcgctacggctatgattattattccttttatctgttattaaaagattgtggacgattaaaagcattagctgttggtaactatcggcttagtttcggacaaggtctggtgattagtactgattatttgatgggaaaaacagtttacgcttcttctttcaataaccgtaatagcgggataaagaaacattcttctgctgacgaatacaactattttcgaggagtagctgccactgtttctttgacaaaagattgggatatttctggtttctattcacaccgttctctggatggagtaatcactgatggaacaatcacttctatctacaaaaccgggctgcatcgaagtcaaaaggaagcggataaaaagaacctgttcaccatgcaattaacaggtggacacgcgagttatcaacacaaccgtatccgattgggtatcaccggtatttactaccttttcaaccgaccatacgaaccggaattaacaggttattccaaatacaatcttcatggaaataacttctataatctgggaatagattatgcttaccgatggcatcgtttttcttttcagggagagacggcaatcggaaaacaaggttgggcttctttgaatcgtttgcaatattcaccggttcaaaacactcaaatcatgttgatacatcggttttattcttataactattgggctatgtttgcccattcattcggtgaaggaagtacgacacaaaatgaacagggatattatatcggcttggaaacttctccttttgcttattggaagtttttcgcctcattcgatttgttttcctttccgtggaaaaaatacagagtgaataaaccctcccgcggaacagatgctctgttccaaagcacttttactccatacagcaatttatccatgtatctaaggtatcgttataaacaaaaagagcgtgactggacaggtagtaaaggaacactaacacttcctatttttcaccatcaacttcgctatcgtttgaactattctttaggagatgtgttaagcagtcgtacaactttagattataatcattttcattctcaggacagagctgctaataaaggatatcaggttacacaaatgatatcctcccaactgccttgggccaggctgtttgctgacgttcagggcagttacttttttacagacgattatgactcgcgtgtatatgcttcggaaagcggattgctttatacgttttatactccgtcttttcaaggtcgtggattccggtgtagtatccgtttcaaatatgaactgaacaaacactttctattgataaccaagttcggcgaaactgtctatctggaccgtaacgagataggttccggcaacgatttgatctgtggaaataaaaaagcagatatacaaatgcaactgcgtattaagttttaggctatctttgtacgcaactaattggagaaattagtagacaaagtgagcagtttaattttgcggtattgactatggattattagttgataaagtatgtaaattgtaaatgataaaattagaataagatgactattattttttcttcacccatcttcggccctatccattcccgccgtttgggcgtttctttgggaatcaatttgttgccggatgacggtaaggtttgttcattcgactgcatttattgtgagtgcggtttcaatgccgaacatcgtacgaagaaacttctgcctacccgtgaagaagtccgcacagctctcgaagagaaattgaaagatatgcaggcaaacggtcctgctcccgatgtattgacatttgccggaaacggtgaaccgactgcgcatcctcacttcccggaaatcatagaagatacgcttgcacttcgtgacaagtattttccaaaagcgaaagtaagcgtattaagtaactctacgtttattgatcgtcctgccgtattcgaagcactgaataaaatagataataatatcttgaaactggatacggtggatgaagaatatattcatttattggatcgtcctaacggaaaatactctgttaagaagactatcgaaaagatgaaagaattcaaaggaaattgcatcatacaaacgatgttcctgaaaggaagttatcagggaagagatgtagataatacatccgacaagtatgtgcatccctggatagaagcagtgaaagaaattgctccctgtcaagtgatgatttatacaattgaccgggaaactcccgatcacgatttgcagaaagctacgcatgaagagttagaccgtattgtggctttattggagaaagaaggcatttcggcaacagcttcttattgaaaatataattcgaataggaatcatctttctaatctgacaataaatgaaagattaaacatcaaacataagagagcgaactctagaattcagcagttttacactcttactctattgttcgctttcttctattattttatttaaaaagagctgttttattagttatcgtatcaataattgattatcgcgctgctatcagatactaagtatataggatgtcagactactatcctgatcaagattaagtttccgtttgagcctgtacttcttcaattcgacagaacgaattgcaatccccataataacagaaatttctttggtagataagttggcgcgtatcagacaacagaatttcaattccgaaggtgataagtccggataaaccttttgtatgcgtagcataaattcatagtgcacttctacaaagtagttttcaaaagataataacttatctttttccgtagcgccctgctgaataattttcattaatcggaggtagagcttgttaggataccggtcgcccagttcattcttttgtgtttccacttctgtagaaatagcgtccagcaattcttgtttttgagttaagaaacgcatccggtttttaagttcactttcttggttccttactttctcctgcagttgttcgtaggcttggtgttgcagttcttccacatgtttcttctgttcctcttcgtattgtttgagtaatcttttccgttttcgttcgctgaagagagtcactattccgacggtgattattaccaataacaatatatatagcgcaatcatccatgttcgtttgtagagaggcggagatacgagtatcgggactattaatgtgttttgattgctatcttttatttcgagttgataagcaccggacggcaggttggtgaagtaaatagtacctgacgtctgccatggactccattcattcgttaccccaggaaggcggtaagagatggaagtggcatgactccccagtcccgtagtgacttgaatagtgatattggtggcggtattaggtaattctatttcctgctggtggaaatctacataaaaagtattgttatcataatcgttgaaacagaaagtctctatctgtaacgggcacggattggagacatggtggtttaccattctattgttgataacaacagttccttcacaggtagaaacaaacgtaattgaatcattaatcgatttcagattataatgtttgtcgtaaagcataagttcattatcaacaaatggccagtgcattattaattcggcagataaatccgcaatgtgatagaggaacaactcttcatccgtagctacccagatattgttcttgtaggctggttttatagattgtaacttgttcagatatactatttccctgcttatttgttcttgttttctgaaactcttcccggtaatatcgaacatgtatattcctttaggcgtcgcaaacagaattttatcttccacttttaccagactgattctgttataattggcatatccgtctatttcggcgaagttctcgaaatccgttatctgatttaggtctttgttgatacgtaggcggaagattcctttttccggatggatagcccataccgtatgaagattttctggcatgatgttggcgtaatcttccgtattcataagtaaagacttgtatttccaggtgttgtttttatattcgagcagggcaataccagaataagaacgtaagaagatatattcatcgccacgatcagccatatattcaaactgtctgacaccgtttatgttgtagaacggttcgaaattggcttgaccggctttcattttaaatagctgggtagtagtaccgcataacaattcattttttaagttgcaaaactggagagggtacatggaagtttgcattttcctgccatcttcctcataaagataaataccttgattggagccgatataagtctttccatcgaaataggctgcgtcgaagaaagtacctatatcagtgtttgtcttccagagataagttgccggttggaggataaccgatgaaattccgttgtcgagcgaaagccatagaaagttttcgttggcgaaacacaaaccgtgaatattgagatcttgcaattgcgaagaatgataatgtgtctgttgtccgtttttcaggttaatcaggaataagccgtcgccaatggttccgacagcaagtatctcgtctttccagatacttccacaatcaattcggacgggaatctgatttttattctccaattggatgaatggggttaccttattttctttcagggtgaatatttttccactggtctgtcctatgatatactcgtcattagcgatttgatacatgaatttagtttctccgttcagaaaggtggtatcctcacaaaagctcttcagttggctaccgcgaatctgcataagaggaccgccgcacttttgagtaaacagccttttccctatcggatagagagaaacacaacaatcatttctgactaggtaatccatctccttaccgtcataccagataatgttgccgaaggaatggaaataaactttgccttcagtttctcctatgctccagaaagtttctcctttgattcccagtttatttaccaacggtagaagggagatatagtttatttttccgtttgcgtcatatttccagtagccgatattattatcgcctgctgtataaattcggtcaccgatacaacgcactgtacgtacggtactacgttcacccggttcgagaagagtccagtcgttgccgttgtatcttaatagtccgttattgttgctgctatatagaatctgttcgggagaaatcgtaatgccccagttctgaattccgcctttatagttcttataattatagttggtgatttgcacaggtgtctgtgctatacctggagagaggcaggtaaaggataataaaatagatagtccaaaaagaatccaattgtatctcattcgtattgtattagcatggaatgtacttattacaaagataaagagaaaaatcgaagatacaataaagcagtttaatttgctagcagttagcaaatatttggtggaatcacgagtaaaggcttgttgttgaatgatagatatatgccggaccatcaattgttagtccggcatatatgctaaaaacacagttaccttgttacctgaaaagttccgcagacgctgtttgcgccattccataatccgtctgttcctgcatagacataagctccgttgtctatccggtagcggaaagtataataataagttcctgcttctgaaacagccggagtaaagccttgataataatactcatttccccagtcactattccagggacaagtggtccatgtccagccagcaccagaagggttcggatctgttgcagagtaaccaatttcacacgtcacatgtttgtttccggaagttgccggttctgccaaattggtcagtccgctaatgaatactttcgagccggcattgaatttttctcccacactgatgttttctccatcccattggagatttgcccaagtgacggagagcttactatagtctataccatcgtcttcttcttcctctcctttcacttcgaaggttttaaacgtactggttgtcccgttccacaatccgcttgttcctgcgtaagcataagctccttcgtctattcggaaacggaaagtgtaatagtacgttcctgatgtggatattgcaggtgtttttccctggtaataatgattgttatcccattgtccgttccagtggcaagatgtccatgtccagctctcatttgacggatcggtatctgttgtggagtaacctatttcacatgttacgtgtttattggccgtaccagtttgaagattcgtcagtccttcaatataaatctgtgcaccggtttcaaactgctcttctttttcgatgggatttttagccacccagctgccaagttctgcccagctgacagataatttactgtaatcttctatgcttgcgtattcatcttcttcctctcctttcacttcaaactttccgttgacgtttacttctccatcccataatccgcctgttcctgcatatttgtaaggtcccgaaccgttacggaaacggaatgtataaaagtaagtgccgacagtgagatttttaatacgtccctgataatagaagttgttgccccagtcttgattaaatggacaggaagtccatatccaatcttctccggacggatctgtatcagtaagagaataaccgatatcgcaggtaatttcttctcctgtttcgctgtcaacagaattggtgatgccgtcggcaaacacacacgaaccagcttcaaaatcgtctccctcattgattacgctagcggcacaccattgcaaattggcccatgtgataggaaactcttcatccggtctttctccttcatcctgaatactttgcttgacggtcagggtgattacctcttcgtcttgtaggaaaaaagtgacatgtccttcgcggggctgacctgttgcattgtcggaaacagtgacagctacattcgctatgaaactctcatttactccgggatagttgtccgggcttatggtaatccagtattcggaagcaacggcactccaacgacgggtggcatttactttgacggcaagagtgcttttatatccggtgaatgacaattcattcttgttgatagtcagagatgccggggctatctcttcggaatctttacaactccaagtgaatagactcatgcaaagagagataaatatataatatatgtgtttcatactgtttaattattggttattagttttatacttattcatatctgaataggactgatctattttatatctgattttacctattcacatatgaatgaacaggttttaccgtaaataggttgtcacacgatatatacccggactccagactgcctgataggaagtaggtgagtaaacaaatatctcgttgctgtggtcggcattgtaattgttactcttttccgatgtaaacgtacgacgtcctttggcaatcagtacagcgttgtggtaagtttcgtcaccattgagcaaacgggtggctttccattcaccgtctgtatcataaccgccttcccatacttgcttgatatagcccgttttctttttgttggtagaagtaaaataaaccttaaggttgattccggcaacgacgaactcattctttccggtttggataatcaatccgtaagcatcttcggcatcgtatttaatacatagttgataatcgcccatcgtcactatacgttccgattcacccggcattttcattacgccaatcatgcggctgctgccttggtattcggaaataagcggcatcaattcattcagcactttataggattgggcaaagacgaaattatccgctccatcttcgataccgaaaggtgaataacaaagtgcactgtgttcgccgaatgcccaaaaagcattagccggtttcatcactgcttcgggaatcagcaacggattgtctgcccggtgatagtctgccacaatattcttgaagtcagacagataaatatccggagcaagcacatcgatatgcggtgcggctgctttccagatgtccattacacgggataccggtccgccgttgggataaactccgggcatgtcatcaggcttttgcaccagccaacagttgcagaaggtaggtagcggataaatctctttcgcaccggcagagataaaatctatgtaagtggcatactgccaagtagtgtagaaactcttgctccagacattatctccgaataccgttttccatgtgccggaagtcttggctccattctcctcccatacggaaagcagctctttacgcaggtttttgcggttctttttcatatattggataagtgtctgcggaacctcctgtccatatgccgcaagtgaggctttcgagtagtccatatcctgaaagatacccacttcgttttccggttgcagggcgatgattgttcccgttgtctgatccacctttttgatgtattccaccaatgttctgaatgctttggcatccgctttcatggtattttcgcagaaaggggaaagcgtttcgatttctttgccttccacgctttttacgcggaaaaaacgcttggtatcctctttcacccaagtaggcgcatagctcgattctccgtttttccagctgccgaaccacaggatagacagtttgagtccgtttttccgggctccatctatcatattgtctatcaatgtataatcaaatataccctcttgcggttcaaactgttcccaagcgattggggcgagcaccgtattcaggttcagtgttttcaagggagtccacagattgttcagatattcggtggttgaggccgaagagttgtgcaattcgcctgccagcatgatgaaaggttttccgttcactatcagttgccagcttccgtgttcgttttttacgagtttggagggaacttcagtatttgttgaagtctgggccttcattgtggaaattcccgttattaaaatcaggcacattatggtagtcaataatttcttcatcgttgttatttatcttaaagttacaggaatagaataagactggtttgcaccatcggtcactgtgagcgtgtatttctttcctctaaggatggagttgtcgaagaaagaaatgatattggttcctgctgtcagttcgatattggtgcgataaatctcttcgtttttcgtattagccagtacaagcagtccgttacccgaattcttcgtatagaaatctatttcatacttttcacgatcgggatgacgcatcatatcatatacatgggttgcggtgttgactgttgccagataaaatcccggggtatattcgggactcgttctgatttctgccagttggaggcctttttgcacatattcgtttttcatcaggagtttccagataagtcctgtacggtagttttccatcatgatggccattggtgcatgttccattgccagatattccgttcctaccgatttatcagaagggcagtaggatatgttaagtccgtaagtaccgtttagttttggataatttcttatcaggttcatcaatacttgtgtagagtagaacggggtatatggaaaagcgctgattgctgccgtaggtgcaatgataccgtcgtctttgaatggttcacgcgatttgtattcaggatttttgccgcaccctccacaggcggttagtccccagtcggattctgaatatttatactcttctggagcttcgtatatgcagtaatggcggttgatcattgtatggcttacgttctgtgtccagtagtaggtatatttgtcttccatggctctgggatccagtccaaggaaagaatattgagacaggaaaagtgcgttgccatattcagtgcctaatggcatcaggtaaccatatgtttttctgccgggagtggcaaagttgcggccttgccaacaattcttgtagatatctgtcgatactttatggttgtccggtgctgccatagccaatatgtataccaacagagtttcgttccagcctatcaaaggtagttcgtaggtattagtatctttgtgccatatccagtataagcggccgttgtttacgaaatggttccattcgatggtctcccaaaaatagtttgtcgtttcgcggatttccttttcagcttcgctgttaccggtgaaatattcgcaggcagttagtaatccgcccatcatgaaagctgtttccacaatttctccggcctcattctggtttccgaaggggaggattttgccgtcgggtctgtaccaatgtgcccaggctccggcaaaacggtcggctgttttcaggaagcggactatctttacgatatgttcggcagcatcttcacgactgatccatccacgttccactcctatcacaagattcataatgcccattcctgtggcacctgtggtaagggttgttttacttgtagatccgttgtaagccattccggttgtctgattagcgccttcatagaaataactgataaccttctgctgctggtcgttcatggcagctttcacggtaagcggcgaataggtgttgtcgttgttcacggttgattcgcctactgtcgattcatcttccacgcagttccacagcatgagtgccgagaacagggtagcggttatatttaatatcatctttgacatatttataattgttatttggtttcgattaatatttaggattttgttgcaacttaccattcgacttgtcgatttccgtttgcgggagagggaatacctcgtgcttgccgacaacgaagttggctactttgtcttcggcaattccccaacgtaccaggtcgaagtaacgttcaaattccagcgccagttcgatgcggcgttcgtgacggattttctctcttaattcgtctttgtcggtagtctttatttcgggtaataccgactgaccgttacgggcacgggctcttaccatttccagctttctctttgcttcatcaaggtcattggtttcgcaggcagcttcggcgtgcatcagtacgatgtcggcataacggatgatgcggagattgctccagtaaccataacaccagtcggcacgtccgtagagcgaacgttcgcttttccgacaataggctttcctgttgaagtatttgtagttgcttgccaccacttcttcaccatccactttttcaccgtgttccagtatagtagcaccgaaacgcgggtcgttactttcgtaatcgttcatcagattttcactgggtgcattatgtccccaacctaagttcgggaatccgcggacaccgttcatcaggcaccattggttgttttcgccgatgatagagatgttttggtccggtttgtagtcggcgttgatttcccagacagattcgggaccgaattcgttctcttcccaaaatatttccgcataaggagtagagaggtcattatcttcggaactgatgatttgtccggtgtaggtcagacagttgtcgtaatccttttcatataggtaagttttggcgatgatggcacgggcggcgttttgggtggcacgtccgatgtttcccgagttaactgcttctttgcgggtaggcaggtcgtttatcactccgatcagttcggacagatacttgttgcggataaccgttgcactaagctggtcggccattgcttcatcctttcccattactctgtctacgtagggtactgcaccaaatgcctgtgtcagtcggaagtatgctgctgcacggataaaataggcttcggccctgtactgtctggttgctgctgtttccccattggcttcttctatgtctttcaacatttgcaaggcttcgttggctttggtgatggcagtgaattgaagagaataataggtattaaacatactgttggccggcgtgaatgacatggtaggaaactggctgaagtctaccccaccgtcgcccgaaggtcctccggggtgactgttatccgttgtatgacattgcatggcggttataggccaggtctgttgggcgaatacgttgtatccgtccattaacgtggcaaggacgagaagttcctgtgcggtacccatatcataattgccttcgtgatatttacctttcggtgcattatcgaggaaggtatcgctgcaagaggtacaggcgaacaatattgctattatataagtaattcgtttcataattcgttgatatttctaatgacttaatttttaattcaacagttgattgggtgagccacttactcaactggtatttctttttaggtcaacggtggatgggatgagtcatttcgctcaatcgatgttgacttagaaattaatggataaacctacggtatacaccgatggtaatggataagtatctccctggtccatccctccttgcagagcacttcctcctatttcgggtgtgtatccggtgttatgtttgaaagtcagcagattttgtccgcttacgtagacacgtaaaccggatatacccaacttactgatagccgatgatggcagtgtatatcccagctgcacattgcgcagtcggagataggagccattttccagcagattggtcgaagaaagataattgtgtccacgtgatttgtcaagaattggttctttgttggacgttccttcgccgtgccatctttgcagacttttctcgtaaaagttggttgtcgtccacgatacggttttcttcaaatctaaaatcttattaccgcttacaccattaaagtctacgttcaaatcaaaattcttatagccgagcataaagccgaatccataggtaaaagttggcatcgggctaccgagataagtacggtcggcatctgtgatctttttgtcaccgtttaaatccttatagcggatatcgcctggtttcgctgtccatgtcatcgggtaatagttgtcgatctcttcttgtgtctggaagattccgtcttgtacgtagccgtaataagaaccgataggatgacctacggaggtacgatgataatctcctgaaataatgtccgagttgttatcacccagtttggttactttattctttaaggtggcgccgttgacattgataccatagtccacatctcctatccggtctttccatgaaaggctaaattcgaatcctttgttgttgatggatccggcattggtaatggcatagcctgcacctatcgaggaagaaggtgatacataagccaataagtcatcggtcgttttgctataataaccgagttccatgcctaggcggttgttgaaaagctgtgcggagatacccacatcgatacctgtcatgacctcccaatgaatgtttttgtcgatatcataactaagagtaggaataaactgcgtcactccgttgatgatgacttgtttccctttcgggttgatggttgggtagtaaagatagtttcctatcttgtcatttcctagtttaccccaactgactcttaacttagcgaagtctaccacttttttcagcggctccatgaaggcttcttcactaattacccaacccaatcccacagacgggaaatatccccaacgatgagacggtgaaaacttggaagaaccgtcggcacggaaagtagcggtaagtaaataacgatctttgtatgcatagttcacacgtgccagataagagataaaagattcctcgttccaccagtcacctgcggaaacacggttgacggaccccatgctaagcatccaaagatcattgggtacgatattcattccgttagccagactgtctactttggcgttgaagccttcactaatagcttttcgtgccgtatatcccactgttgcatcaatacgatgattggttatcatctttttataacttaaaaggaaatctgcctggaaggtgcgagcctcatcgcttttgcgatagaaattggtaatatcgttcttatgtgccgaatggctggtagagttattcacgtcatagcgtggtgtatactgttcgccccgatagagtccgaggtccatatatccggttgctttcaacgtaaaatctttcaggaagttccactcaccataaatgttaccgatgatgcggtaatcacgatacttctccgtatccttgtaaagctccatttgtgctactggattgttcacgttagattgtatatcggcagacggatgatagagcgaacctaggttttccgggtcgtaatcttcttccggagcataaggtacataggtagggagtgccataacagcattttggattttggcggaagcaggtttgctatccatctgtgagaggttgatgtttcctcctgctttcagattcttggtaatgtcataatcctgtgagaaacgtacgttgaaacgttgataagtattatatttcagtacaccgtcctgcttgtaatagccgactgataatagagacttgctgttcttcccggatttggataccgtcaggttatgattggtaatcatcgctctttctcttaatactttgctttgccagtcggttcccgtacccagcatgtcgggtacccatgaagcagcgtttgggtcctgattctgcaacatctcattgtagagcatggtgaattcagttgcgttagtcagctttacccggtcgcgtttccaaacggtttgtgcaccgaaatacccgtcgtaggtaaccgatgtcttgtttccttcggcacgtttggttgtgataataattactccgttcgctccctgtactccgaagatagcaagagaggaaggatctttcagaatttccatgctggcaatgtcgctgttgctcaaaaacttgatgtccgacatcaacataccgtccactacatacaaaggattactgctggcattcaacgtaccgataccacgaattttaatatccggttccgcacctgccgatccggaattggtcaccatcagtcctggtatttttccttgcagggaagacattacattattagtaggcgaatttttaagttcctcaccggatacagagacaatcgctccggttaaatcccttttgcgggccgtaccgtaaccggttactactacctgttctaactggtaattatcattcttcagataaacattgattccgcttgaacggttttgataagtgataggaataatttccgttttcataccgataaaactgaccaccagtttatctcctattttcacgcctgacagtgagaaggaaccgctcatatctgtttgagctccgttggtcgttccttcaattaatactgcggctcccattaatcccattccggtttcttcttcgaaaactgtcccccggatattgaaatcctgcgcttgtactaggcaggtacaagatagaaagaatagatacaatactacatgttttatcattctcttaagattttaaagttaatgaatctgctatcgtcaacaaaaatagattcagataacgggagttcctaaaattcttcccctacaaaactttcagttcttttatctgatacccgacagcggcacatcaaatatacatcatatttcgaatttgaaatataatggtttgtatattaacaatttacatcctgtgttaatctacaaatccgtcatatactttttagcggtaacgattaatcaacatgttctttatgagtatttttctgccttatttatcttataattgataggatatttttatttgttcatcaggtaatattagtcgttttgtctgcatgggactaatcacttcttcccatcctttagccaactctattgcatttattcattaaatgcacttgaacaaccgttgtacatccgtctggttgctcaagtctatcctggtggttgcttaagtgcaaacaggtactgaattgaaaggaaagttttggaaggatactatgatgaaaatgtagaatctatatgctgataaataggatattatatgaaaaatgcagttttcttgcagaaaaacgtaaaaacaccctattgtttcttgtaaacttcccttaaaatagggttcttttgagggttaaacgattgattattaaccttgccacatttttgtttttccccgtataatacgtaagataagaattaaaatgtggcaagtctagcttcctttcttcacataatctttcggcaatatcccgaactgcttctgaaagcaacgggcaaagtatgaaggattattgaatcctacaatgaaacaaacctcattgatccggtattctccttcacgcagaagttctccggcggtcttgagacgtatcaaccggatataatcattgggcggcattccggtcagccctttcaacttgcgctgtaagttggaacggctgatagccatctcttctgccatcttatcgatggtaaattcttcattggtgaaatttcgggtaatgatttcattaatcgtgttcagccattttacgtctgttttgttcattaatgtctggtcgtatgacatattcggaacggttgtaaagtggttgaacagcatacgccggttttccagcagattattgatggtggctttcatgtgacttagtgagaaaggcttttctatataagcgtccgcgccatagtcaagacccgcaatttttgaatcgatgctgtcgagtgccgaaagcaggataaacgggatatggcaaagcatattgtcggaacggatggattttagtagttcaaatccgtccatgtgaggcatgacgatgtcactgataatcaaatccaccgttgttgtttccagacattccaatgcttccttaccattggtagcggtatgaatcgtataggcgtttcccagattcttagccagaaattccaacatatccgtcgtgtcttccactaccagaagagagtaaccggcgggttcgccctcttcttccaaagcgggaaccttgtcgggcatggaaatgacggcgtgggccgtcggaattcttttctccaaataaggaatttcgacgcacacttcgcaaccatcggtataattagggttgatataaactctcccattatgcttttcgaccaataatttaaccaagcttagtccgatacctactcccgatccgttattaccggcatttcccacttgataaaacggttcgaacaccttaccgcattcctcttgcggaatccccggaccgtcatcacgtacacaaatagaaagaatacgtccttcggaagacaaatgttcgtccataatcaccctgatacaggtacgggcatatttcatggcattggtcagcagattactgacgatttttgttaaagcctcttgatctacattatattgcagatgttcctcgggcagagaaacactgaaagatattccggtcagggagatggcacggaaacggtcgatgatatcctcaatcatccggttaatatctacttcattgaatgaaagcgtatccccttccttatccactttgcggaagtcgagcagttgcttgataagctccatcagccggttggtgttcttctgtatcacagaccggttgctttctacttcactgttccattcacgggtttccaaaatagcttctagcggagctttgataaggcttaccggagtcttgatttcatgtgccacttgagtgaagaatgtaattttcgactggaacaactcctgattcttgatttgttccatctctttcatctttcttactttcactgcctgttgcttacgcagataaagcctaaccagaaaatatgcgagaccacatgcaattagtaaatagaaaattttggcatagatcgttttccagggtggaggaagaatttcaatatgcaggcaacagtcgtcattgctccaatcttcatcgttgttactggcttttacacggaaagtatattcgcccggaagcaggttgagaaaagatacattatgtttgtccgtgtatatccattctttgtgaataccgtccagtttgtaggcatataaattcttgctgggagccacataactaaggctttcgaatgtgatgtcgaacgataccacctggtaaggaacagttacctgtccgctaagagcaggaatacgtttgctaaggctcaccttgtcatcgggactgtgcatatataccgctgagatagacgccgtaggtcttaccttattaatagataacttgaacggatagaaactattaaacccgttcaccccaccgaaatagaatttcctgtcactggcttgcagggaagaacggaaattgaactggttgctttgcaatccgtcctcgatggtatagagttgtgcccgtttgttttgcagttcataccggatcagtcccctgttggaagaaagccaatagttacccgattgatcatccagtatgccatagatgatattgtttggcagattctctttggtggagaagttttcaaagcggtcttcctgatagtgataacgacagatgccaccgccttcggtgcagaaccataggtgctgtttgtgatcgatatacacacggattacccagttgctacaggtagaagctgggttagccggatcgttacggtagttgtgcagcttaccggtctggcggttgtaacgccagataccgtctcttttacttgccagccataagtccccatactggtcttccaccatatcgtagataaagatatggcttaaaggctccaatgtccggaaagaatcactttccgggtcatactgacagaatccggaaagcgtacccaaataaatgctgccatccttcgtttgatagatggagtagatatgatcgttaggaatagagtgtgggtttgcgcggttatggcggtagtttttcgtttttcccgtttgaatatccaggatatataatccccgggaaaaactgccaatccacaattttccttcattgtagagcagtgcatggatattgtgataaccgatattagggttactgcttctcaacagatggtttttaaacttcttcgtccggggatcaaagagattcagcccccgtcttcggtaacaatccaaatgttaccgtcgggatcttcgcagaattggctgataacatttcccgaaagagaattttccgtaccattgggataataccactcgatatccttatgcttgggagacaggtaactcactccactgaaataagtcccgatccagattcccccctccctgtcctgataacaggcatagatactttctttattttgttcgtcgtcggtaggcagacattctcctgttgtggtgttgaatgtataaagtccgtcgtcggaaccgagatagaaagagttggccgtccgttgaaacaaggtgcggatgcgcggaatggtaagcgtgtccccttctccgaagtaatagcggaattgccccgtttccttattgaaacgtgccagtcctccgtatcatgtacccgcccataatactccctgcgaactttccatcaaagagataatctcgttgcaggcagggcgtccgaaagaagtgtcctcggatatataccctgtgaagttgtccgtccgttggttgtatttcgccagaccgttccgagtgcctatccagatcgtcccgaacgaatcattataaatcacccacacatgattgtccggcaatgaatgaggatcggaaagagaatgtagatactgcctcaacgtaccttttttttcgttgtagacaaacagtccgttagctgttccgatccataactgcccgttgttgtcataagccattccgaaagcactgttgactgtcaccccgtcttccgtctgtgcatcgaatacggagaacttttcctcccgcgagtcgaataaatacagcttctctgtactggccacccaaatctgattgttatcctgatggcggcagatcgttactatattcatataactgtttccactgttttctgacgaatgtccgtagttggtaaattcgataccgttgaaacgattcaacccatcctgtgttgcaaaccacatatatccgatgctatcttggaggatgctccggacgcaattgcccgataaccctgatctaacgtcatatttcttgtagatattggcgaagaccagagaaaccgatgccagcagtatacatatagataagatggatcgtttcataatttcctttctttagttatcaggttcggtttaatcctgttcagttctgtttttcagtttaatttaatcccgttcagtttagccccgttcattccggtttaatttcgtttagttttcctaggcagttatctgctccacaagctatgatagcctgttttattggcgatatatcttctgtttgcaggaactatataccctgcatgttgaatctatatacccaacacgcaggacatatattgccaacagattggatctatatctcctgtaacccgggtaactatcccctctatagagctctttatttcacgtcatcccacgtatccgtgcggaacgggaaagcactcaatccgaaagtgttgcgcagcgtgatatttcctacgtaattacggaaagcatagcgcacggcaaccggttgggcaacctcttcgcttgatacttctaccgtgttggtacgtcctataatcttcgctttcgctggatagaacttcttgtcggctcctgcaatctcgaatccctccagttgggcgaaagtagggaacagtcccgcaggtgcgttattgaatgttactatggccttgttgtcctcatagtctactttagtcatcatcggaccgttggacggcaatcggccgatgccgtatgttttagtcaatgcaagcgtagccaaccgaagccctactacatctttctgtggcggatggatgcagaattcatcaccaatatccgtagtgggtacgatgcccgaattaggaatcgttttcagggcttccatctgtgcttcacgcaataaagcggcacccgtatcccggctgtccttatatttatgaggagcaatctgcacataatagaaaggcatagcgggatcttcccatacatttctccatagctgcaccatagcagtcatcatcggagcatagaattgatagttggatatgttcgattctccctgataccagaagaaaccacgtgccgtgaagttcttaacaggccataacatcgagttgtacagacattccaaacgttgatgaactcccctcttgggatttttggcagcttcaatatccataccttcaacgattttcaatgtcggttcatccatccatgcttcgatagccgaacctccccaactgttgataaccagtcctaccgggagatggagactttcagtcagttgtctggcaaagaaataggcggcagcactgcaatcaatggtcgtttcaggtgacgatacttcccattttcttttctcaaaatccatgcgacgttctgtttcattagttctcggaacagtgataaaacgaatacggtcgcggtaatttcccgagttcagtagcgtttcaagcgagttgtcaatgggttgcgctgcatttcccatcatacgcatttccatattcgactgtccggagcatatccacacttcccctatcagtatatccgaaagagtgaccggagtgccgtcactgatggtaatagaataaggtgtataacccccttcaggagtgtctactttcaccatccaagccccgtctttatccgtagacgcctgataagtccggttgttccacgaagtagtgacggttacttttttgccgtccgcccaaccccataatttaacggaactattctgttgaagtaccatgtgatcccccatcattgcagggagttttatcttaccttgtgtgacagggaagaataaaagtgataaaacgagaattaaaagatgtcttttcataccattatttattataagatatttaataaaatgtgtatgaaacaaaattacaacctatttttttaatagtataaaattatttgttcattttctgataaaaatagattgtaattcattgaagctaataatatcgatccgataaagggttcttttattcttgtttttcgagattgttcattcttattaatgcttcgataaaataataatcagcataagtaagcggaacgtctacttctcctttcatcggcttatgtccgacactgtgtttgagaataaaatttccattagtgttgggagctgccagatattcaggggaagataatgtgcggagttggcgctttgctatactccgatactggatcttcttttccggtagatattcacttaattctgtcagtgctgaagccatgatggctcctgcagatgcgtctctcaaatcattggggatatccggagaatcaaaatcccagtatggaatgccatctgaaggtagaagcggaatgaacatatctgcaatggattgcgcttgtttgagataacgtgatgaatgagtcgttcggtacatcattgtgaatccataaagtgcccatgcttgtccgcgtgcccatctggagtgatcattatgtccttgcacagtttgcttctttattattttcccgttttcaggatcatagttgacaagatggtaagtgctgtaatccggtcggaaatgattcctcattgttgtgtttgcatgtgtaatggcaacagtttttaaataagggtcgttatactgattacctacccacatgagcagttcaaggttcatcatattgtctatgataaccgggaatttccatttatcgcgggaggagtcccagctacggatggaaccaatgataggattgaatcttgttgctaatgacatagcgccattatggagaatattcaaatactctttgttgcctgtcaatctatatccattaccataactgcaaaatagctggaaaccgatgtcatgatctgttttgaggaattgcagtggagcaagtttttgtgtataggtgtgggctagcttttttatattttcagaaccggtatattcataaaggtaccacaatgtgcctggataaaaaccgctacaccaccaatagatatctgaagtgatgagtctgttttttgagaaactgcgtgggactctatctttttccagggtggaagccatgttggtatattggatagaagctcgttccatgacttcctgtgttatttgttggatgctcttttctgtctgggcattcgtatatatgactgttaatgacagagtcagcaagatgattatttttctcattatttttttgattgaatttttaattaatattctttggctctttagcaaatgtagtggtaaatacccttgtatctttcgcactcatttgtgcttcaaatcctaccattgtcacccctggattggcttcatcatatttattgtctgtagaggccggccatgttttcagagtaaacgggtgattgttttgttcttgtacggtcagatacaggatttttccattctgtgataacttgatacagtggtttgagattatttctgctgttgcaggtgtagccatggcccaacgcaccagaggagttttgtttgcacggcttttgatttcatcttttataaccagttccagatcacctccgttatcaatgaattcggcggtgcgtacaggggcatcgacatcgtaatcatttccatttctgtttactccaaagcactcgaatttggcgccaagtttagtcccgatagccttcatataatctgttcgtacaaaagcttttccttgataatgatattgattgttattaatggtaataacattgtgactgaagttattgagacggaatatgctccatcttgtagaactttggctgctgttccaaagatctatacccgcagcttcgagaggagcatattcctgcatacctaaatccattgcccaacgttctccataggcatcgtatacgaatgttgcgccatccatgtgaccatgacttgtgtttgaacgtcctcctttcattccgaaatatttatcagtgtctgagtaagtccagtctgtatgaatgagtactaccggagtatctccatctccccaccataactttttttgtggggcggaaatagtttcttttacttgctcggaatcgatgaatcccatgataataggcaataagcggcgttcttcgaatttgctggcatatgctcctttttttagcagcctgagttcattaaacaataacgagctgtgtccctgttttttagcaaaccaccacataggtagtttaggttcttcgggttcggtgcaatccgagtagttaaaacattttccagttgttccggccatgaataacatatattctgcggttttcaaaaaaccggcacttgtttgggataatccgttatctgtattgaacaccttttccagtgcagcgattaatattacttgataagtagttccatatccccaatacatatatccttcggggtaattcccgtcagtgccgtaggtagtcatgcctttggttttgttactgttaaagctttgttctatgatttcaacagcacggcttttgtccttctcgtaagtaacgagtgcagcggccagtaaccctccattgcatacttggttccaatttgtagttgtttcaataaactgtttcgaataagtggggtcagtagcagttttaaatgcgtagttttcaagtgccgtttgagccatctttctggtttcaggctgcagatcattatatagccagtctaatccgattgcaacggctaaagccatttctcctatatccagataatgggttggattccagtcggggaaggaacataccgaacgaatatccttctctgcctgattcagataagtataatcattgttcattctatatccgtatgccagatggcaaattcgttccagtgctttacgtgaaacagtcagaagtcgtttgccacttttttgataagtgagagtggaggctccgacaaattctttgttgcatctgtttatgatgatctcatgaatgattttaagtgtggagttatttgtaatttcctgtttcaagtgatcaaaatcttgggcgtttaggaataatcgtggatgctctcctattttggaatagtcgaatatgccattgggatcagctgaaggatcatcctcatcatccggttgcgaagaagagtctttctctggtaaaacaggcttttcaatttctggaatatctacatcgcaacttccgaaagtgaatatagctccccataatagaagtgtatataataatatttttttcatgtgtctattcatttttaataaggttgaactttactttgattgtaattttttctttgggatttagggcaatgtcatatcccactctacacgtacccggattttcataatcgtagtcgtgaggtggagtattatcccaaatatgcagattcacctttcgcggagagtcaacttgtagtgaaagctgtttgtttccttgggttaacatgatagtttggttatccgctattttaggaatagtaggagtacacattgtccatcgaattagagagacagtatctttgttctcaagataatctgttatttccaatgaattgtcgggagtgagaatcacagtacgtgttgcctgattgatagcttgtcctaatgttgaagtcaaattaacctttgctcccttgttcccttgattatcagtgaaactttttaactcggcaaagccattcacctgatggctttttccatcgatagtaagtgtgttatgtgcactgcttcctattcgaaatacttgccatctttgagaatactgttttgtattccacaagtctacccctttactttcaagactgtaataatcctgcattcccaaatccatggcccatcggacccctgcttgttcataaatgaatgatccggcatccatatgggcatgtgaggtagaagctgttccgccttttactcccagataggtatccgttttatagttccatccgcttcgataaatataaacgggggttgtccctatactatgccacgtgttgcctttaggactgattacttcgtctaagtcgatgcgtgaagcaaagatgagtaggcatggcaagaacctttcttcgaggtattcaccaaattccaggtttgcatcattcagatacttcttctcaagccaaagcagcgacggatttttagttttatgggcaaaccagaacatcatgatatttccatacgcttttggactagcatcagagaagttgaaacaatctcctgttggagctgtcatatattgaatgtattgggctgattgtagaaaaccgggataatcacttagtccggcatcatgacccaaggaactttctaatgcatcattaagcatcacttggtatgaggtaccataagaccaatagccaaagccttcggggtaaccgccatcgggagcataacattctaaagctagaggtactgtttgaagtgccttgttaatgatctcttttgttttttctggttcatcttcatagatagcaagtgcactacatacaagtcctccattacaaacctgattccagtttgttcttgattggtagaaactggcatgttttgttttagaggcttctattgctttttctacaatagcctgccggatttttttccggctgtccggtaacagttcattgaatagccagtcgtaaccaatggccagtcccatactcatttcgcttacatccaggaagtgactgggattccaatcgatgaaagaagctgctgccagcatttctttttcggctcgccggaggtattccttttcacctgtcatacgataagcgtatgacaggtagaagactcttttgagaacaatgcgcgaaactcccagaagccgtttgccttctttgattcttttaaccggagcctctttaagagtttcatcacagtagtctaatattcgcttgtggaatgcttgtaaaacggtgcttttttgcaaagctatatgaatatttctctcttcaccttccttgagtaacaggcggggatgtggagcaatatggctatagtcgaaatctttcgtatagccttttgctcctcccgcaataagtatgaatataattattaatagttgcttcattttgcttttatttaatacgtccatccttctgtaggtttgagattcggatttctttgggtttctactagtggaataggccataccgtcatataatctttccaataccatttacttccaacgatgtttccccaccatgctttcaaaccgctataatcaccttgaaacttggtctctttataggtaccccatctgatttcatcgaaataattgatactctcgagacataattctacccgtcgctcataacgaattctgtctctcatatcttccttaccggagacagaattatatcctgtaccccttttttctaaatctcccatacctgcacgtttacggattttattgactgctataattgcttcatccaatctatctttttcattaagcgcttcagcataaagcagccatacatcggtaaaacgaattagtggataatcgcaatgacaacgcagtcgttctatataacggcctttctctgtttcattgtactttttataaatgtagtaccctgcattcctttgattatgccacatatctccattatttcctccacgattcagataaggccatctaagaactttattttgcatgggttctccactattccagtatgggctgtagcaattagtgcttgaataaggagtgatgatggtctgttgtaatcgtgggtcacgtgattcatatgcttttttgatacgtgcttcatttccggagtcgagataatatttattcatcacttcggctcctattcgtgatttggcatcattataagcactttgattggaagttagattattgcgtaggaaaaaaacttctctttgagccggggtaaggtcatcccatccggttagataggcactccatttgaattcggatccatcagcattacgatagtaatctacaaaatcggctgatgggattaattccgtccagcaatcatagtggtcgcgtgagccgaccatcagttgaatattgtcgcaatatccactagcttcatcatattgtaacgggagtatcatttctttatctttttcattctcatacttaaagaagtcgatatattttccctcccataagtcataaccacactttttaacttcttcaaaatctttaatagctgaatcatattctttcttccacatatatatcatccctcttaaagcataagccgctcctttggaaggtcttccataattttctttcagcgtgttattacctaaatgcgggctttgaatacatgcagtgaggtcatctaaacaaattttccagacatcatcggcggaagactttccccgtgtggcttcactactgttaatgggttccagatagatggggactccttgaaagaacatattaagccggtaataaaagaaagctcgcataaatttggattcacacattaggcgttccagcttttcctctgaaagtccggctttatgtaagttggcaatagcatcgttgcatcgatggattccttcatagccaaattgccactcacgtgaaatataggcatatccggcgcttggggcggttgaagttagcagggcgatgcttgaatagtatccggagcagaatcccattgattctattcccagtttattgatacctgttacttccgacttttcagggttaaggactaggaggcttctgttgtatagtacgtcataaataccggcaactcctttgtctgccagctcttcacttgtccacatgttacccgtggctatttgatcgtacggagttgtgtcgagcatataagtacatccctgaaggatgctacagattgtcaggcagaatattattacttttttcataattcatttatttgttatatgagtaatcgatgaattaaaatgatagttgtgcaccgaatgcaaactgtctggttaatggataagttattgaagtacccatttctggatcgagtcccggatagcttgttatggttaacagattttctccggaaaaataaaaacgtagtttctctaccatgaattttctggtccatttcacgggaattgtatatcctatctgaatgttctttagtttgacataatcacctttatacttccaaaaaacactgctggtaccattatcacgttgtgtctggtctgtgattcgtggatactttgcagttatatttgttctggagtcagatggattttccgggttataaaagtaatgattgtccgctacacgctggctgattccaaatccattttcagttcgagtaccattgtaggaagaatggttccaataaagatcgaatcctgcactaccagcccatagcatatagaaatcaaaacctttgtaggccactgaaagattgagaccaaagttataacggggctgggtagaggttccggtaaagttcatatcattggtatcaccataattgccgtctccgttagcatctgcataaatcaagtcgccataccataattgatcttttgccaccttggttactccattaaacttatatccatcagctatcatggcttttacccaggccatatcagattctgtacgaatcataccgtcgactggtccagcattgatgtcaggttttccttcggagtatgaaccattaccacgataaggttgtctcaaatacatttctcctaacatcctattttcaacgatgacacctccaaaaccgctttgtgctacatccccgtaattactgacgaatctcgtagggtttccggcattatcatattcccagtatctggcaagttctcctttatatttcattaccttgttttgattgtaagagaagttaccttctatacggtatgtaaaatctttgatattatcttgccatcctaaagtcaattctacaccgcggttacgtacttctgctatattttctgtagaaccggtgactttacccatggataggggaatggatggagtgaatagtattcccgtggtcattttattataccagtcgaattctcctgtcagtctgttgttgaagaaacctaagtcgattccaacattggtggtggttgtagattcccactcaagaaaactgtttccaagtttactgatagccagtcctgtggtaggtgaagagttgataactactttattagtactataattggcttgccagtcatagtttcctgatgcgttatttccaagttttccccaagaggcacgaatttttaaattagaaagataatcttgtgcaaaactcatgaatttttcttcatttattctccaaccagcagagaaagatgggaaaactccccaacgactttccggggcgaaccgcgacgaaccatcataacggacatttgcttcaaatagatagcgccctttgaaggcgtaattaagacgtccgaaataagaaatcagagcccagtctgtttcattactgtcgctggaaacgagttctgttgctgttttaagttgagttaggctccagtctgacataccttttcgtgttacgtcgaaataattttcattatagtaggaagtcgtgaatccacccaatgcgcttatttcatgatcgtgggaaagggttgtgttatagcgtatcagaatttcggagttttctctacgtcttttaaatgatttgttattaatgcttgcattttctaaggcactttcattggcacgtatgttttttacgtaatcccatgtaccgtttggagctccccatgtggcataatctccccaatcaggagcatagttatagcttgcttcgatggataatcctttcatcgggcgaatactgccgaagagtgtgaaatttccgcgaaacattttatcatatccacagcgtctcattttttcgaatatgttattggcattagtggattcttctgttgccgctggtagcccccatttatcattttctcccggatagactccgggagttgttttataaagatattcaaatccgcggctgatattggcaaggcctatatcttgttttaatccattgagacgggtaccaacggaaaaccatttattaatttttatttcgatgttcgttcggaattggaactgctggaatccggagtctgttcctttttggttcatgactccatctatatcttgatatcctaaagataaaaagtagtttaccttgtcattacttcctgaaatagatagattatgtttttgtgagaatcccgatcccatgatttcattaaaccagtctgtattaggataggccatgtaattaggtatcccgaattcattagtcccattgggattattttgggcttcacgccatttatctatggttgattgttcaaaaatatgagcttttcctacattttctgcaccctcgttgataagttccatgtgtctggcatagtcactgactaatgagagtttgttttgaggagtctctatagagccatagaacgaatagtttactctggtttttccctgtcctttcttggtagttacaagaatcactccattggctgcacgtgagccatagattgctgccgaagctgcatctttcagtacagtgatactggcaatatcttccgtattcacattgttcatgtcccattcgataccatctacaagtactaatggattattagagttcaatgttccggtaccacgaatcctgatagttgctccatttgaaccgggctttccggaactttgttgcacttggacacctgccgaaagtcctgccattgcactagaagcgttggctatagggcggcttgacatttcctgattaaagtttactgttgatactgaacctgttagatttgcctttttctgaacgccgtatcctactacgactacttcttcaagtgattctgatttaggaagtagagtcacatttagtatcgttttattatccacgagtattgtttgggatacataaccgatataactgaattgaagtttggttcccggcatgacttgaatggaatactctccttccagatttgtagaggttccattgcccgattccaaaatggaaacggtagctccgggcaaaggatagttactttcgtcggtgacttttcccgagatttttatttgctgggcagacattgtcaggcaatgtaaagcgaatatagccataaatagaatgtgttttttcatataatacatatagaacaaatggtttttaattagaaatattcctttcaataatgctctaaatattttcagttcaatcgctatacgtcaaataacttgtccggacatataattaagaagtatagctggtatattagaaaatatcagagaactaaatgatggttactgcaaaaatagatggtatattgcaatatcaatagtccggatgaggaaaataataccaattttagtaatgaagtgaaaaggctaaaacataaaatagctcaagttagtcaaataaggctccgaattagtcatatttttgtgacggggggggtgatgaatgaaaataaattctatatttgcgtatatcataaatgttgcacaatgaatcatttatttcgtatattagtgctggtcattacgattgcacaagctgattttctttgtggccagactttttctgttatgagaaaatatgatgttaagaccggattgtctgataatacggtgaggaccatcatgcaagattcaaccggatatatatggctgggaacgaaagatggaataaaccgttgtaatgggactgaatttactaaatttgctgattctgtagattcatcaaataatacattaattaatgtcttgaagctttatccgcatatcgaccgagtcaatatttggacagctactacagacgggctctatcttttcaatactcaatctaaagatttcacactatttggtgagaaaacagacctgggagttagtgttgtgggtactgtgaacgatttgtgctatgatgatgacggacgattatggattggtacttcgagaggattatttgtatataatgaaaagaaagggcagctacgaagatatgtgaaatcgcaggtagaaccgacttctatccctgataatcaggtaatctcagtgtttaaagattcttcgggaactttatggttcgggactcgtcagggattggcgagatataaaaaagcttcggataattttgcagtatatcgcctgcctcgtcttacaaaggtttctcacccatttgaaataagcactttgatggaaacagctgatggtgaaatttggataggcaccagatatgatggattgttacatctggacagatcggatggttcttttagcgcttatcctgtagtagcgacctatcaaaacaatacttggattcgggctcttttccaatatagctcgaatgtgttttttataggaacagaagatgggttatttctatttcgtcagaaagagaaaactattcacaaattggaggcgttcggttcaaagtgtatttattcattcagtcgtgatcgcgaaggtggagtatgggtgggtacttattttgatggggtatattatatatcaccgcaaagtaattatatcaaatggtattatgaaaaacataaacaaaactcattatccggaaatgcggttagccagtttagtgaagactctgagggaaatttatggattgctacagagaatggtggtttgaactattttaatccgcgtactgaagagtttacacgttatatggcaaatggttcttctacaaatgtcagccataataatatacatgctttattactggacgatcatcagctatggataggaactttttcccggggtattgatatcatgaatctgaaaacgcgttctgtagtgaaaaactatctatataatatgaatgattctaattccattcctcataatcatatttattcgttatataaaaacagacgcggagaaatctttgttggtacaatgggagggttttgtcagtttttaccggaaataaacaagtttcatcgttttgaaaagttgaaggatgtgtttgtatatgatatgttggaggacagtgcgggtatactatggattgccaccaaaggagatgggatatggcgttatgatcggagaacaggaggattcaagaattacaagcattcagtgtccgattcaggctctttgagtaataatcgtgtagttcgggtttatatagaccgtatcgggcaactgtggttttgtacggaaggaggtggaatatcccgttatgattatgattccgattcttttgtgaattataattatcgaaagaagttgtatagccacgttatatatgggatactggatgataaggatggtaatttatggttgtcatccaactatggaatcataaagtataacccactcacggaagggtcgaagctatatactcatgaagatggtttgcagagtaatttatttaattttcgttcatctctaaaggccagtaatggactgttttattttggaggagtggaaggatttaattgtttttatccggataagttatatacaaacacggtcaagcccactgcagtaatttcttctattaatttgcatgatagtagtgggagtgcaggaacgcataaaataaatatcagtaggcagagtgaatttaccgttgattatcatatttcttcttttgagatagaatatgaatgcctgagttttgtagctccttctaaaaatcgttatgcctataaaatagatcaggtgcatgatgactgggtttatacggataaacactcggtgactttcatggatctaccttcaggcacatataaatttatggtgaaggcagcaaataatgatggggtgtggagtgataatccttgtttcataaacctacatatagaggctcccttttggaaaactatatcagctaaaatcgtttatgtctttttacttttattttctgcttatttacttctacttaggtactctaaaaagcaaagtgaaaagcgtgaacgtgagaaaaaggatatggagctgatgatggagcaggagatgtatcgatctaaaattcagttttttactcatgttgcacatgagataaaaactccggtcagcttgataaaggctccgttggaggccatttttgaatctggcacatggagtgaggagactgaagctaatctttctatcatccggcaaaatacaaaccgattactcgaattgatcaagcagttgttgaatttccgtaaagtggatcaagaaggctataaattgtcatatagcgaggtggatattaattcttttatgaaagatatcatcaggagatttacttcattttcatcatctgttactattcagacgaagtttgcacaagagcatctgatatataatgtagatgctgaggctctgacaaaaatagtcagcaatttgctgaccaatgctttcaaatatgcgcgtaatgaaatttgggtttctgctggtgaagctgttgtggaagatgctgtaatgcttgaaatttctgtcggtgatgatggcccgggagtgacggaaaccgaagctgctaagatttttgaaccattctatcgttctggaaataacaactcggcagagacaggttttggaatagggttgagtcttgtaaaattgctggtagataagcttggaggtaaaatatctgttggtaaaagtagtcaaggcgggtttctgcttacgatacatttacctaaagcggaggttagcgtaaccaagttggccgataatcggaatgaacatgaattttatgggcattttgaaatatacgaatgtaatcttcttattgtagaggatacacatgatatgctggaatttttattgaaaaatctagggtataattacaatgttttgggagcaacaaatggaaaagaagcattaaaaatattacataacaacactattgatattattattagcgatattgtaatgcccgagatggatggttttgaattgttgaatgcagttcgtgcggataagatgttgtgtcatattccatttatattgttatcagcacaaagctcggttaattcaaagataacaggattggattacggagcagacgcctatattgataaacctttttctttaagtcatatcaaggcaacaatagataatcttctgaaaaacagaaaggttctgtttgagcgttttgccagtatgtctaatttggagtatggtcaaggagaaattaaacgttctgatcttgagtggcttgaacaagttaatgagattattatccgcaattttacgaatgaaagttttacggttgacatacttgcttcagaaatggctttgagtcgttctaatttgcaacgtaaattgaagggagttacgggacttcctcctattgattacatacggcttgtccgattgaagtcggccgcacagttcttgaaagaggggaaatatcgagtgaatgaagtctgttatctggtaggtttcagcaatcattcttattttgctcgttgttttcagaaacaatttggagtattaccgaaagattatatgaaaggtagttgaattaaatctgttctgtttttaagatattcacggaaaaaggaaagaaagaaaagggccaaacagaaaataaactgcatgaacaattgcaagaatatgcgttttttctttttatattgtatttatttccttgaaatatgcaatatatggcgtcactaaaccatcggtttggtgtaatcaaagcttcggtttgtttaaaacaaacgctctctttggtataaacaaaccgttggttccttttaaaggaagcggaactaggcttttgaagagggtatttagcgctattttgtctttttctattgcttatttataaatagcaatctgctgcatttcttgtgagatgatagctatttgtacttttgattggctacttttattgcaacttgtttgctaatagtacctatcttatgttatttgcgaaatctgtaactctaaatggcgggcgtttttcatgaagtgcaaggaaacggctcgaatgatgaagagcaggacaagtaaaatatgcaattcttcatgttggcacttttttcagcgatcaatgtcattcttcttttctgttccgataattggccggtgatgttcccaaatgcgcttttacgtatttcccgaaaaaggactgattggggaagttgaactcttcggcaatttccttgatagacttttccgaacgttttaatcggtatttgatatgctccacggtagtttcgttaatcaaatccaacggagtcctgccacacgcctgcttgatgactttcgagaaatgcttcggagtgtagcaaagctcgttggcaaaatagctcaccgaacggtgcatccccttgtccttcgataacagttccatgaacttccgcaaaatgtaattcacctgtttgataccttctttcgaaccctccgtattgccggtagcttccatttccttgtgaagctgtcccagcatttcgcaaaagatagcggaaaagagatattgcatcacttctttgtggtagcaatgaggctcatcgtttatcttggctataattaaatcccggtagaatccgaagaaagttttatcctccccgttgccaaccgacttcaccggattgttgtggatatgaatggcagtattccacgtttccttttccattttaataatacgttgcaggaaacgggtagagaatccggcaagcctgactttatatttaggactaagcatcgtatggctgataatcgtattgggcagaccgagcagcagctcgcccgcctgcaacttataggtccggtagttgacgtctaattggatgcacccttctatacaaaccgcgatgagaaaacaattcagtttgattgtatcattactataaggagtcccctccagactgttgactatcgcaaagtcatcatcgatataatcaaggacgtgctgactgtccttaaaatcctctatatccaccgtaataatgttctctttttccatgttctttccttttttactttttgcaaagttggcgaataatcgggaaaacagaatgtcccatacttcttcagatttgtttgatatgtcgtttattgccaaatagttagctataataaacgtaaatggcgaaaataggacatttatggagggaaattggtcactcttgccttgttcttttctcctacttttgtccaggatttaacaaaagaccaaaagagaaagtatgattacagtaagcaaaaaatggatacggctgatagggattgtcggttgtacagtgtggatggcatcttgcaagcaagcatcggatgcgggagtgaaatcttcttcttatgcagtaatgcagatagaagcggtggataaggaattttcttcttcctattcggcgagcatacgtgggcggcaggatattgatatctatccgcaggtgtcgggaacgattgagaaactctgtgtgaccgaaggacagaaagtgcgccgcgggcaatcgcttttcattatcgaccaagttccttacaaggccgcactcaaaaccgccattgccaatatggaagcagcacgtgccgcactgggtactgccgaactgacctacaagagcaacaaagaactgtatgcgcagaaagtagtttcggaattcagcctgaaaacggccgagaattcttatctcaccgccaaagctcaactgtcgcaggccgaagcacaagagatcagtgcccgcaacaatctctcttataccgaagtgaaaagtcccagtgacggagttgtcggtgcattgccttatcgtgcaggcgcattggtaagtgccaatatgccctatccgcttactacggtcagcgacaattcggatatgtatgtctatttctccatgaccgagaatcagttgctttccctcacccgccagtatggcgacatggacgaagcgttgaagaacatgccggaagtggaactgcgcctcaatgataattcggtttatgataagaaaggtatcatcgaatccatcagcggcgtcatcgaccggcaaacgggtactgtggtggcgcgcgtggtgtttcccaacgaatcgcggttgcttcatagcggagcatcgggcacggtggtagtgccgagcatttataaagactgtattgctattccgcagacggccaccgtgcggatgcaggataagacgattgtatataaggtagtggacggaaaggctgtatctaccctgataacagtggccgcaaacaatgacggacgcgaatatgtggtgctggacggactgaaagcaggtgatgaaattgtatcggaaggcgccggactggtgcgcgaaggcatgcaagttaaataagaaggagactgattatgaaaggaaatatatttataaaacggccggtgatggctatctccatctccgtactgattctggctatagggcttatttcgctcttcacgctgccggtggagcaatatcctgacattgcacctccgacggtatacgtaactgccagttatacgggggccgatgccgaggcagtgatgaacagtgtcatcatgccactggaggagagtatcaacggtgtggaagacatgatgtatatcagttccagtgcttccaatgcaggtttggctattatacaggtttatttcaagcagggcacagaccccgatatggcggcagtcaacgtgcagaaccgtgtggcgaaagcgcagggattgcttccggctgaagtaacgaaagtcggcgtcagcacgatgaagcggcagaccagcttcttgcagattggcgctttggtctgcacggacggtcgatacgatcagacgttcctcgccaattatctggacatcaacgttattccgcagattaaacgtatcgagggagtgggagacgtgatggagttgggcgatacatacagtatgcgtatctggctgaaaccggaacggatggcgcaatacggactggttccgtcggacattaccgccatattgggtgagcagaacattgaagctcctaccggttcactgggcgaaagctcgaagaatgttttccagtttacgatgaaatatcgcggacgcctcaaaagcgtggaagaattccggaacacggttgtccgttcgcgggaagacggttcgatacttcgcctgcaagatgtggcagaggtggaactgggtacgatgacgtatagtttccgcagtgagatggacagtcagcctgccgttctttatatgatattccagacagccggttccaatgccaccgctgtcaacaaagaaatcactacgcagatagaacggatggagaagaatctgccggaaggaacggagttcgtcacgatgatgagttcgaatgacttccttttcgcttccatacacaatgtggtggagacgctgattattgccatcattctggtcatcctcgtggtctatttcttcttgcaggatctgaagagtacgctgattccctccatctctatcattgtgtcgttggtgggtacgtttgcctgtctggtggctgcgggtttcagtctgaacatcctgacgctgtttgcactggtgcttgccatcggtacggtggtggatgatgccattgtggtggtggaggccgtgcaatccaagttcgatgccggatataagtctgcctatcttgccacgaaagatgcaatgggcgacgtgacgatggctattgtctcctgtacctgtgtatttatggctgtgtttattcctgtaaccttcatgggaggtacttcgggcgtgttctatacacaattcggtatcacgatggcaactgccgtaggtatttcgatgatttcggctttgacgctctgtcccgctttgtgcgccatcatgatgcgtccgtcggacggaaccaagagcgccaagagcatcaacggacgggtacgtgcagcttacaatgcttcgttcaatgccgtattgggtaaatataagagaggtgtgatgttcttcatccgccatcgctggatggtgtggacttcactggctgttgccgttgctttgctggtttacctgatgagtaccactaaaacgggacttgtgccgcaggaagaccagggtgtcattatggtgaatgtcagcatttcaccgggaagcacgctcgaagaaaccacgaaagtgatggaccgcctggaaaatatcctgaaagatacgcccgaaatagaacactacgcccgcgtagcaggatatggactgatatccggtcagggaacttcgtacggtacgatcattatccgcctgaaagactggagcgaacgaaagggcaaggagcatagctcggatgctgtggtgtcacgcctcaacggacaattccaggcgataaaggaagcgcaggtattcagcttccagcctgccatgattccgggttacggtatgggtaattccctcgaactgaaccttcaggacatgacgggtggagaattggctacgttctatgaagcggctatacagttccttggtgctctgaacgagcgtccggaggtagcgatggcttatacatcgtatgctatcaacttcccgcagatatcggtggaagtggacgctgccaaatgtaagcgtgcaggaatttcgccgagtgcggtgctcgatgcggtgggcagttattgcggtggcgcgtatatttccaactataaccagtatggtaaagtatatcgtgtgatgatgcaggcttcgcctgaataccgcctcgacgagcaggcactgaataatatgtttgtacgcaatggtacgcagatggctccggtgagccagttcgtgacgctgaaacaagtgctgggaccggaaacggccaaccgtttcaatctttacagcaccatcaccgccaatgtgaatcctgccgacggttactcctccggcgaggtgcagaaagtgattgaagaagtggctgcacagtctttgccggcaggctacggatatgaatatggtggtatggcacgcgaagaagcaagtagcggtggtgcgcagacggttttcatttacgccatctgtatcttccttatctatctgattctggcctgtctttatgagagtttcctcataccgtttgctgttatcttctccgtgccgttcgggctgatgggatcgttccttttcgccaaaatactcgggttggagaataatatctatctgcagacgggtgtgattatgttgatcggtttgctggctaagacggacattctgattacggagtacgccatagaacgtcgccgcaagggaatgggtatcgtggagtctgcctactctgccgcacaagtccgcttgcgtcctatcctgatgacggtgttgacgatgatcttcggtatgcttccgctgatgttttcctccggtgcaggtgccaatggcaacagttcgctgggtacgggtgttgtgggcggtatggctgtcgggacactggcattgctctttgtcgttccggttttctacatcatctttgagtttttgcaggagaaaatccgcaaaccgatggaagaggaaccagatgtgcaggtgcttttagagaaagaaaagagtgaagttgaacgcgaacgtaaataaatgaaagaaagaatgaagaagaatatcatcacattagttgccatcagtctgtcgttgagcggttgtggcatctataccaaatatgaacccgccactgtcgttcccgacgatctttacggcggggaagtggtgaccgaagacactgccggtctgggtaatatggactggcgggaactcttcaccgacccttatttgcaatccctcattgaagtgggattgcagaccaataccgattatcagtctgcccagctccgtgtggaagaagcacaggccgtactgatgtccgccaaacttgcttttctgcctgcttttgccctttccccgcagggaacggtgaacagttttgatacacacaaggctacgcaggcttattcattgcccgttactgccagttgggagctggacgtattcggtcgtatgcgcaatgccaaaaaacaggcgaaagcactttatgctcaaagcgaggattatcgtcaggctgtccgtacccagttgataacaggcatagccaatacttactataccctgctgatgctggatgagcaactcgacctttcccgtcagacggagacggcatggaaagaaaccgtggcctccacccgcgctctgatgaatgccggactggcgaacgaatccgctgtgtcgcagatggaggcggcctattatcaggtgcagggttcggttctcgatttgcagcagcagatcaatcaggtggagaacagtcttgccttattattggcggagacgccacgcaactatgagcgtggtgtattggcaaagcaacagtttcctgccgacttctcgatagggattcctgtacggatgctttcttcccgtccggatgtccgctcggcagagcggacgctggaagcggcgttctatggcaccaatgcggcacgttcggctttctatccttccatcactttgagcgggagtgccggatggacaaactccgccggggcgatgattatcaatccgggcaagtttctcgcgtcggcggtaggttcgcttacgcagccgctctttaacagaggacaggtggtggcacaataccgcattgcccgtgcgcaacaggaagaagcggcgcttggttttcagcaaacgttgctcaatgccggtagtgaggtgaatgatgcgttgattgcctatcaaaccagtcagggaaaaagaatcttgctggataaacagatcacttccctgcaaacggctctgcgaagcactactctgttgatggagcatggtaatacaacctatctggaagtgcttacctcccggcagtcgttgcttagtgcacaactgtcgcagacggccaatcattttactgaaatacaaagtttaattaacctataccgtgctttaggaggaggtcaggaataaactgtatcatactctctgttttctaatttaatgaaagaagggctgccggagaagtgattctgtggcagcccgtttgttaatcggtcaatatcggtcaatatgcggcgaattggcttgcagccggaaacttcagccagcataaagaataatgatggtattatttaccagccagacctttcttttttctttctttatattgactgggtgtttccccggtatattgcttgaaagccgtactgaaataactcggagtggtaaacccggttttctctgcaatttcagagaagggcatatccgtgccggatatcaatgtaatagctttttctatacggagcttactgatatactcgttcgctcccatgcctgtaagtgctttcagtttgttataaagcgaagaacggcccaatcctacttcctggcaaataaactgaatgcccagattggaattttctatattttcctggatgatactattcagtttaatcaggaatgtttcgtctgtcaggctgatggtgctttcttccggtgtggggattaatcctgcattcagataccttttcttggtatattcccggtttttcaaccggttgcggataagttccattagcatttccacttcgaaaggtttgcttaaatagccgtccgctccattcttgtaaccgcttatttggctttgcctgtcatctctggcagttagcagaatgactgggatgtgactgatattgatatcctctttaatcgttttacaaagtttatacccgttcatccgaggcatcatcacgtcactgactataatatcagggacatggcttctgaccagttgaagggcttccaccccgtctccggcgataattatccgtttgaagtatccttcgaacgttcttttcagaaagtctgtcatatccggattgtcatccactacgagaatagtgtatggagtggtgtcgaatacctctttcgcggacggctgcccgctgttatcatccatcatcaactcgttcagataagcttttggctcgcagatgatttcttccggttcctgcctcaacggcaactcaaagaaaaagctggctccggtttcttcattatcctgtgcgccgatagagccgccgtgcagttccaccagaatcttggagtaagacaagccgattcctgttccgctctgttctcccgttccctggtagaagcgggtaaagagcttgtgcgtatccacttgtttcagtccgcatccctggtcgatgatggagatacgcacccggttttcttcgggcagcagttccgaagcaatcgttatttccgtgtcctgcggactgtgtttcaaggcattgataagcaggttacttaggataatctcgcatttgtccttatcgaaactgactttctctatccgtgggtcgagctgatagcggatatgcacattctttgcttccccctcactgataaaatcctgcgaaacgtgttcaatccattgattgagcggatgaggctgaatttgcagtttactctcccctacttccattttccgcacgtcgagcaccatattaatcaagttcttcattcgttgtgcctgccggtagatggcttttaacggcagatattggctgtctccggaagagagcgacttcaaaatctgattgagtggcgcatgaatcagcgtcagcggagtccgtagttcgtggctgatattgataagaaaacgtaccttttcctcgtacatctgtttctcatgctctttcatcgcccatttcagtttttcctgattacgtttcaatgttctgcggaaagtttcgatgattatggtggcaatgagaatggtgcaaccgagaatgaaccaccacgtgcgataccatggcggaagtacggttagttctagtattttctggttgggaatccagctgccgtctttcgctgtgcatgaagccataatcttgtaattgcccggtggtaacgaccggattaccaattccggctggtacgattcgatatactggtcgttcagcccctctatccgatagcggtagactttcttacggaagatatcctcttctttcgacatgattcggatggtgatattgctgtcccatgggacagagattgctgccggatgactatatagtttgttctgtgcaggctcaccattgatgataatatccaacagttgcagttccggcatttccgatgtattcagcagcagctggccgtcaatgcgcagcataccctttacatcgccgatatagacatccccctcattgtttaccaaccgggcgttgggcagatattcgttttggatagctccgttcgactctccgaagagaacgaacttctgttcctgtataagccaggcgaaaagtagattatccgcacctatccatactttgcccctctggtcgcattgcaccatgttgacttcggtaaacaggttggtagggatgtgcgtctgcttttgggaaacggggttgtagtggataaggccgaaattgcttcctatccagaaatcgccgtgctcgtcgtgtgacgccgaactgattacggtatcctgataacattcgaaggttgtttgcagcaaggaatccccatcgtgcagttcgtagatatgtttgaaatcgttgatgtaagtccggttgttctcgtgcttgaaggggacgagcgtgccgacaatacttttcccttcttctccggtgaccttgtcgaatttcttttctttcaggtgatactggtagacatggtcgcccagtaataacacggtgttgggggtgttctgatataagttgaccgatttaccccggttgcaaagttgtgtcgtagtttctttgtcgacaatggtaaaaggctgtttctccccggttgcggggttgaatatgaatactcctttggagaaaagggaaatcagtagttttccgggagtgaatccgctgataaacgctattttatcgttccaggtagaaagataatgggtgaatttctcggtacgcgggttaaagaggttgataccgccgccgtccgtaccaatccagatactgtcggtcgattggcggtaaaggcttcgcacggtgctgttgcttagtccgcggtcgttgccggggactacgtcggtgtaggttttcatgaacacttcccggatgctgattaatccgttgcaggtgcttcctgcccatatattgttattgtggtcgttgtgcaggcagagaatggagttggcggggagagagtagttttcacgtcccgggatatattccagttgggagatttccccggtttcggaggtgaggatattgattccgccgccatctgttcctatccacagttgcccttccctttcggcgaggcttaggacgatgtcgttgctaagggcggagttgcgggtggagtacgaagccagtagtttgccgtcgtatgagtagcaacgaagtccgccgctgtaaggggcaatccatattcttttccggctgtcggtcatcatggtggtaatttccggcccgcagtcgaaagggggccgtctgtgctctccggtatgcaggtctacgaggtatatgcctgtccaacggctgcaacaaagcaacgtctttgaatcccacatactgagagcgttgattttaaaagagttggcgttgaaatattgcagaagccggagagaagaatcgttataactatatttgtaaatcctgtccttgccgccaaagaggattccgtccgggacaaggcagaaggaataggcggtgatattcttcccgtcctcgtccgtggggaacgtgaagtcgttgctctgctgttggtagcgggcaatacctttttcagtcagtacccagatgttgtgttgcttgtcttcggcaatctgataaatcaggttgtggagaagcgagttcgggtcgtttgcctggtgtttgtatcttttcagttcgtgcccgtcgaactttcccagtcccgatttggtacctatccatacgaaaccctgctcatcccggagaatacagcgcacgttggaaggcaacccttctttcagagagatttgtttaaagtaatagtgttctgcccggagagggagaacaccgactaactgtatgataaagaaaaggcttggcagaacagcgtatttggttttcatgtaaagcaggtttgtttatgaggacagatgccttctttataatacggctaacttgtccccttttaaggtgatttcgtattttttcccttttacggtcttgaacttgagcgtcttgtctccgtatcttacgttacaggggattccggatttggaatggatgatagctttctccagttgtccctctttccaggagatggaaacctcaaaatttcctttggcgcagattccgcttattgagccgtttgcccatgcatccggcaaagcgggaagaagttggatgaatcccatgtggctttgcaataacatctcggttattcctgccgtaccgccgaagtttccgtctatctggaaaggcgcatgggtatcccagaggttgtccagtgtaccgtttttcaataagttgccgtatagtttatacgcatggtttccgtcttgcagtcgtgcccattggttgagcttccaacccatgctccaaccggtagcgccgtctccgcgatgttccagtaccactctggctgcctgtgcaagttcgggggtagtcacgggagagatggtatgccccggatgcaatccgaacaggtggttgacgtggcggtgttcatctttcgggtcgtctatgtcggtagaccattccaacaactgaccgtagcgtcctatacggtacggaaccagtttggtcagtacgttttcccattgtttgcgttctttggcgtccgttccgagcaccttgcttgcctggatggcgtccagtaatatttcacgtactacggcatgcgcgaaagtgactccctcgtccaccgggccgtgttcgggagaagtggaaggagcggcggtgtaagtcccgtcgggcttgtgccacaagtggtctaccgcaaactgtgcgctgcttttgataaggtcgtagccgatttcctttaagaatttcgtgtcacgggtataatcataatactcccatatatgcgttgccagccacggaccgacggtaggattcaggttccatgccatagatttgctggataagggagctgtgaatccgaagatattggcagagatggatgctgtccatccgcgggcgttgaaataggcttgtgctgtcttctcgccgggttttaccaagctgcgtataaagtcaatcaaaggccatgtacattcagagagattggtggggcacgcaggccagtaattcatttgaatgttgatgttattgtggtaatctacccgccacgggccgtcggtattgttgtgccacaatccttgcaggttggctggcatgttgccggggcgcgaactggctatgagcagatagcgtccgaactgatagtacaattgttcgagctgatagtccggcacgcctttcttatagctagccagtcgtttgtaggtcggcaggttgggagtgccgatttccggattgatttcaaaacgtacccgattgaacagcgcggtataatcggcttcgtgattacgataaagctcgtcataaccttttttcagggcattgtccatcatagccagagtcgtttgtgacgggtcgttgccgacgtaggctttcgggtctttgaagtctggggcaaagttcatcttataatcggtatctgccgtaagcaggaataccacttcgtcagcatccttcacaataatccggtcgttttctgctttcagtgttccccctttgtggatagctttgattcggaaagcgaatttcattccgttgttattgagaacgccggtatatactaatccgtcgtttccatctgcttccagatggctttttgcttcgttgttgggacaatagctaagtacaagattctgttttccgcctttgtcggcagtaaacttcatgaccataacgctgtctggataggatatgaagtatttacgttgataccgtatcccgtctttgtaaaattgcaccacagccatcgccgaatccaacgacaggatgcggcggtaattgctcatattgatttcgctgagtccggtttccacataaagctctcccatcgtggtaaaagcaccgaagcggaacggagtctcgtctttttcttcataagctcccagcccgttgaagttttcttgtgtgagataccccgccttttgggaatctccgtccagaaaagcctgtcgtatttctttcaatacacctgccgactgtttgtttacattccaataatattcggcgcctttggcagtattcggtccacctttccaaagcgtcttttcattcagtgtgattcgttccgcggatatggagcccatgatatttgctcccagactaccattcccgatgggtagcgaacggctttcccatgtcttgtccggattcgcccctgtgcccgaagcgcgtagccagacagcttgtccgtcgagattgttgggagtgtcgaaccatatggaaagttcttgtgtataatccaccgtttctattgatgatgcagtgagtgaaaagagagtgcaaaaaataaggaagcagagtttcttcataagatgtattatttataaggaatgtgatgtgcaaaggtattgtttttttaggatttcagcgaacggcctgctttcgattataaccaataagcttttaaaaatcaccaaaagtgcttctttgtgtaggtagtaagatgtttctaatgagaaactgtatgacgaagggcataaggacctcattgtaatatcgaccaaaatgaacatgtttatagataaggtccgtaagaaagcaacgatgatgaatccatttcctgtggcagcccgctttgtttcaataatgcaactttctttatgacagttattacctaaacagtttctgctataaatctcatccggctaatagcatgaaaaaataaaaggatttatgtctgtcacttcaatgcggcaatctttcaactttctttccctttctttgttctttctgctgaaatatgctacttttgtattatcctcatagatatgagaactaaagaaaggaacaaatcatggaagaagtaaaaagaatcccttatggagtttccaactttgtggaagtggtggagcagaaccaatattacgtggataaaacgatctatctgcctttgttggaagagcaacccagtaatttgttctttatccgtccccgccgcttcggcaagagcatctttctgagtatgctccgggcttattatgacatcgctcaaagagaaaagttcgataaacgcttcggcaatctatggataggcagtcgccctacacggctgcaagggactttccagatactctttcttgacttttcccgtgccagcggtggtagtggtacgttggccgagaacttcgaccgttattgctgtatggtcatggatttgttcggtatgtcctacgaatcttattattttccgggatttgctcaggagatgaaaacacagcccgattttgtaagtaaactgaattatctgaatcttcatgcggctgaaaccggagcgcatctttatcttatcattgatgaatatgataacttcaccaatgtggtgttgaatgagcagggcaaggaagtctatcatgcgctgacccatgccagcggcttttaccgtgaaatcttcaagaagttcaaaggtatgtttgagcgcatctttatgaccggtgtcagccccgtgacgttggatgacttgactagcggatttaatatcggttggaatatcagtaccaagcaccagtttaatatgatgctgggattcagtgaaacggatgtgcgtgagatgctccaatactataaggatgccagacagttgccgggcaatgtggatataagtgcgatgatagaggaaatgcgtccgtggtatgacaattattgttttgccgaagaaagtctggaacgtgacccgaagatgttcaattgtgacatggtactctattatttgcgtaactatatggatttgggcaaatcacccaaagagatgatagaccccaacacccgtactgactacaacaagatgaagaaactcatccgtttggacaaattggacggtaaccgcaaaggcgtgttgcgcaaaatcaccgaagaggggcagattatcaccacattgacgactacctttcccgctattgatatcaccaagccggagatttttcccagtctgctcttttattacggtatgcttaccatcactgctactcggggcaactatctggtgttgagtattcccaataataacgtgcgtaagcagtattacgaatttctgttggaagaatatcaggataaccggcatatcaatctgaatgaccttggcttgatgtattatgaaatggcttacgaaggtcattggcgtgaaacgatggaatttattgctcatgcctacaaggaaaactcttccgtgcgaagctccatcgaaggcgagcgcaacttgcaaggcttctttactgcttacctgagtacaaatgcctattacctgatagctccggaactagaattgaatcacggttattgtgacctgtttcttatgcctgacttgatacgctatgacgtgaagcacagctatatcatcgaactgaaatacctctccaccaaggattccgaagcgaaagccgaagcccaatggcaagaagctgtagagcaaataaaaggttatgccgttggtgctaaggtgcgtcagatggtgcacggaaccgagttgcattgtattgtgatgcagtttcgcggatgggaactggaacgggtggaggaagtcatgctgaaataagctcaatttatactgtcatttctcattttaggcaaaatatatctgtaattcccttatttcaacaaagagttgtctgattgccagactttgtatgataaactaatttatgcgctaaatctatatatttagcttggtaggcatatatactcaccacgtgggcttatggttgcttacctgtggactggaaatattttagacataagaataaaagataaagcagttatgtgtaattattattgtaataaaataagtgttaaagatgactcaacctattaaaaagggtaactaaatttcttaaacatatcaaacgatgagtgtgattctgtaatatgttgatatataaatagttatcttccctcttttttcctttaaaaccaacgacctgttgcacaccgagaaacacatcgtttctcggtgtcgaacaaatcgatagataaggcaatttgaaactaattacgaaatagctttactaatcttgctcgatggtgatgcggtaaggaataaaactatgtgtggatgaacttgtttaaaccagtactgaagtaagcagagccatgtacttgacttgctcaagtctcttacatcatttcattgtatgtagtatttgttccggtcaagtctactactaaataataacagtaaaaaaccggcttcagctttcagttcttcccaaaaagtccttttcatcggagtttttgcctaaaagcagacctgaatgcaaaagcgtataattttagttccttttttgatactatatctactttaaacaaaggctctgttttagcgaaacgaagcctgcatttcattagaactgagcctctgttttaccaaaaaatagaggctcaattttgttcagctcacgcgtcggtgatttccatcccacactccaccgacttttgcccacgtgatgaatctatataccccgcttgttgggtatatagattcagcgtggtgagtatatatacctactacgctgaatatatagatccatcagctaatttgagaaaactggatgcgctgaaagcactctaccttgtttgcagtatctttctgcgagggatgtctttttccgctttcagccgctatttcctcctatcaaggcgtttgcagacaacactgaaacggctgaaccggattataacatgaatattcaataagagggttttggcaaggtcagaaccggatagttgggtgttttaatcattgtctttttgagataagaaccatttctccgatggaacgggttgatttggtgaaaagtgaatatttaatggctattttttaaatattgatttttgttgttgtacctatttttgtgacgttgattttaggagaaaaaccaattgtttgattaatggagactcttattgtcagcgaatagaaaatcttaataacttaaatttatgagaaacaaattctttttatgtcttttcgtgttagtatcgctaacagcttgtaaagacactaaatgggtagaagttccgggtggaatgccccctgaaggagcaatcaccggacagccgggagtggatgatccggctgagaaaacattaatcaattgtcaatacattggtggtgaccctttcgaattaaaccgtattccggtagaaaatctgattgtcagcaatgatcttatttatttggctgcgcgtccttatgctaatggagatatagcttttgacttgcctataaatgatgcaacttttacaggcggggtttcgcatgaagctacttatgagggacgtagcggtgtgataaaatttgacggaaccggaaaaatgaatggaaaagatggattattgcattctacagaagagacatttaataagagtttcacttttgctacctatatatttatagatgagtgggtgcccggagcatatatctttaaaaaaacaagtggagataaagtgttggctgccttacaattaggtgctaatgagcagactgtgagctgggcgttgggaaatgcatcagtgacagcaggtacctatgtggatgccacgggcttggctccgggagcttggcattatctggcggtagattatgatggtgataaaaaacaattcaggatttttgtagatgcgtggtcttctacgcttgacaaagaaatcgtattgcctactgcccgtgccgatttttatataggtgaaaacttcaaaggccgtttggatgaaacttctttttggagtatggcagcaggtattggtgggaagaatggtataaaattcaataattggaatatggtagcaaaagtgttggcttattggcaatatgatgattctaccaatccggggaaggactctcacacttggttggaccgttggaaaaaaatacgcgaaaccttggcagctcaggcaggtaatgacagccgaaaattacgattaggattcggcagcgggcaatggaggcaaatgatgagtgctgataatacgcgtaccgcatttgctaataatttgaagagtgttttgaaggaatatgaatttgacggagtagaccttgatattgaatggcctactacggagacagaatatgctaactacagtgcaacgattgtgaaaatcagacagatacttggcaaagacgtatgtttctccgtatcccttcatccggttgcttataaaatttcgaaaaatgcgattgaagctttggattttatgtcttaccaatgctacggaccggcagtgatgcgatattcttatgagcaatttgtaaaagatgcagaaatggctgttgagtacgggattccggcagataaactggttctcggtgtgccttttatcgggactaccggtgtaaatggagaacaagtctcttactctgattttataaatggtggactttcggatgttgctttggatgaatttacgtataatggcaaaacgtatactcttaatggtcagaatacgattcgtaaaaaagcgaagtatgcttgtgaggaaggctatagaggaataatgagttgggggtccgatgtgtcggtaaataatgaaaaatcattgttgaaagcgatacaagaggagtttgttgcttatgagattaataatcccaagtaaatgtaatcttaattattaaatgtaatattatgaaaaaagaaaaattaatgaagatacaagaacgacttgtttttcttctgattttcctattcttattgccgataggggtcattgcccaacaaaagatgattacggggcaagtagtggacgaacagggagaagctgttattggcgccagcgtgatggtgaaaggtgcaaaaaccggaacaattacggatttggacggaaatttttctgttcagggaaaagcggggcaaacgctttctataagttatgttggctatactccattggatgtgaaaattacaaaattacaaaacaatcgattcgtattgaaggaaaacacggaagtgcttgacgaggttgttgttgtcggtatggatacgcaaaagagaaatacaattacggcggcggtatctgtagtgaaaggagatgatatcgtcaatcgtcccataacggacctcaccagcgctttgcaaggtaatgtagcaggattaaatttcgcatcggatgcaatgggaggagctaaaggaggtgagttgggtacggatataaaattcaatatccgtggtgttggctctatcaatggtggcgaaccgtatgtattggtagacggaatcgagcaaagtatgcagaatgtgaatcccgccgatgttgctagtatcagtgtgttgaaagacgcctcggcagccgcgatttatggtgcccgtgccgcctatggtgtggtattggttacaactaaaagtggaaattcggaaaaagctaaagtaagttattcgggaacagttggttttagttctcctatccgtactccacagatgatgaattctttggagtttgcttattataataatgctttgtatgatgccggtgcatctgcttcggggattaatagaatctcggactcggttatagaaaagattaagggattcatgcagaatccatattcagaggaatttccgggaatagatgtatctagtaacggagaagactgggctagtgcatattatgcccagtatggcaatacggattggtttaaatactattacaaggataagtccattcgtcattcacataatttgagtgtacagggtggatcgcagaagataaactactatatcggtatgggatatgtctatcaggagggctttctggatcatgttaaggatgatttgagcaagtataatctgaatacaaagctacaggcgaagcctactgactggttgagattcaacctaaataataatataactttgcaaatgataaaacgtccgatgcccaaccagtctattatttataataagataggttcgcatcgtccgtcacaagttacacatttgccgattgattcaaaatataatattcccagctggaacgaaacgcttttcatgcaaaattcgaattatgaaaataatcggctttcagatgccttgtcagtatccgctacggctactctaatgaaaggatgggatgttacggctgaaatgaagatacgttttgatgtagaaaataacaatatgattctatatgagaatccgcaatatgaaactcctttagggacgctaaaaccgggtgatgctactggacgcaggcaaggattctcttatccgaatatcgattggaagttaatgaagttcggttcttatgcccgtggaagtctgttcaattattatttgtcgcctaatgtgtccagtatgtatattcagcaatggggaaaacattctttcaaggcaatggcgggattccaaatggaaatgaaagaagattccaatgagtatatgtataaagatggaatgatgagtaatgatatcttttcttttgcaaatgccagcgggaacgtcatagccggagaagatcgtacacattgggctacaatgggggcttaccttaagttgaactggaattatgacaatatatatttctttgagttcagcgggcgttatgatggctcttcacgttttgcaaaaggaaaccgttggggattttttccttcattctctgctggttatgatattgccagaacagattacttccagaggctgaaacttccggtgtctcaattgaaagtccgtgtgtcttatggtcgtctgggtaatcagaatggagccggattatacgattatctggccactatgtcattggatgctttggggtctaatggttggttattgcctactgcctcttctgccagtgctatcaagggaacgatagcaaagacccctaaaatggtaagtccgtttattacatgggaaaaagtggataatgcaaacttgggacttgatttgatgctgttcgacaatcggctttctttagaagcaaatatataccagcgcatgacaagggatatgattggcccggccgaagctattcccgatattagtggtatagcttccgaaaaccgctctaaaataaataatgctacattgcgtaaccgtggatgggagctttcggtgaactggcatgatcagctgaaatgtggatttagttatggcgtaggattcaatgtgtttagctataaggctgtcgttaccaaatataataatccggatggaaccatttacaataatcacaccgggtatggtcctaataaaggatattatgaagggatggatcttggtgagatttgggggtatcaggctgacgatcttttcatgacaaaccgtgagattgacgattacttgcgaaaggtggatatgagtgcgctcaagccggatgatatgtggcgtcgtggagatttgaaatatatagattccaataatgatgggaaaatagatggtggtgacggtacgatatacaatcatggtgacttgaagattattggtaatacaactcccaaatattcgttcggtatcaatttgaatgtgggatataagggttttgaagtatctactttattgcaaggagtggcaaaaagggatttcccgatttcgggaagtagctatatgtttagtgcaggtagctataacttcaaggagcatctggattatttcagcccggagactccgaatggctttttgcctcgtctgactagctggaaaaataatcaggacttttatgtaaatacagggtataattcaactcgctatttattgaatgcagcttatatgcgtatgaagaacctgactgtatcatataatttcgataagaagttgctaaaacatatcggtattagtcgactgaaattgtatgtagcatgcgataacctgtttactgtaacaaaattgccaaaacagtttgacccggaaacgcttaatcaggtgaacggaatggctggaggtactactacagaggctccgggtctaacctcaccggtcgtatctaatggtaatggtatggtgtatccgctaaaccggaattttgtattcggacttgattttactttttaaatagaggataatgatgaaaaaaatatatttattagcagtagctttagctggtactttattgacttcctgttctgactttctggataaagtgcctttggtggtgcccagtagcgagacattcttgacgaatcaaagtgccgtgactaattatgtcaatggtttgtatattgctcttccttctgcaggtgcctatggcatgggaataatgggagaagaaaagaatagtgataatatggtagccatggtgtatgacaggcgtatgaacggagagttgcaagaatctatcggaggcgtaacagaatggcagaaaggataccagaatctacgtagtgtcaattacttcttagaatattataaagtaccggcagctgaagaaacggcggaagtattatctctgaaaggagaagcctatttctttcgtgcatattggcactattacttgttgactaaattcggcagtattcctgtgatggacaagttttgggatggaaacgctaccgttggcgggttacagattccggcacgtgatcgttcggcagtggcacaattcattcttgatgatttgaaggcagctaaagagttgctatattcccgcagcaaatatcagggattgcgtatttgtaaagaagctgctatggttatggcgatgagagtggcactctttgaaggtacgtgggagaaatatcataaaggtactgactttgctgctgccgagtataaatcagatgattttttgcagcaagtacttactttgggggatgaattgtttcaaatgggtattacattaaacacaaaagagaatgataaatcagtgaagaatattgatgatgcgtatggaaacctattcaattcaaaagatttgtcggctacccaggaagtgttgttttggaagaaatattcaattgccgacaacttggttcacagtttaaatacgaatttatccagtggaatgtgtgatgctgaaggaccagctggactttctcaatcattagtagataattatttaagtgtggatggcaactttattgatcccacagccgcaaaattaaaagatttcaatgaatcttttaatgatagggatggtcggttgctggccactgtaatgcattcggactgtaaatacaaatcgatgacagtgaaaggagctaagaaaatgctggtgaaggcttattcagaggaagataaagatttaatcaatcctcctcaaattgtaagtaccggaaatcagagtaatactaccggctatcatatccgtatgggaattgatactacattcgtaagtgggcagggagaaactgccactccaatgattcgttatgcagaagccttgctggcttatgcagaagctgcggaagaattgggaaaatgtgatgctgctgttttggagaagactataaagccattacgcgaacgggccggagtcacttatctcgctccatcagctattgatcccaatttccctgattttggttatacaatttctgccaatctgcaagaaatccgtcgggaaagacgctctgaactgccattgcagggaatgcgtttggatgatttgatgcgttggagagcacataagttattccaggggaaacgtggcggaggcgcttactttggagccggcagcgttttatataaatcaattgatccgaagaatgaagaattggctcaaattctggtagacaataacgattacttggatccactgaaaaatgttcttccacgtgggttccagtttgatgcgggacgtgattatctgcttccgattccaccgagcgagatatcattgaataaagaactgacacagaatccggggtggcgcaaaaattgagaagcatcaacttaagttcattgataattataaagaaaaaaacatgaagaatatattctacaaactattttcaatatctctattgggtgtatgcttgatgggatgtgaagatgaaactaagtatttgcctttaccacaagctgttccttttacgatgactgtcaataatacgacttttgtaatgggcgaaaagttagttgtcgatttggatattaatccggataaggatggaagcgaggttttggctaacgaagattttgatatttattttaccgctaaaactggtacggaggatgtgtccggcgtattcaaagattttcataacatcgttacttttccgaaaggtgagaagagtattcgtgttgagttccctctgaaagaaactggattggaaggaagtaaaaactttaattttgtagctttttcccgcggatacgagattggtaaccctagttttcctataaaagtgtccgattactatcgggtaaatatggcaatacaaggcaatgcggacaatatagttacggaaggtgataaatttgtgttggtagccagtctggataaaccgagggcaatacctattgcggtaagtatcagcgcaaaagcggaggatgagagctcttttgaaaatttgcccagtgaactgactattcctgcaggagcgctgaacgcaaaaactgaccctatatctttagttatggatggagcgaagacaggagacaaggagttgacattgaatttcacttcaaactctgaagctaatccgatgaagtctgatcaattagtaattatgatgactgacctcgaatctcttgccaatccggatatgtatgatccgaccttggtgtatgaacatccggaatatccatttgtatctaaaggcaataaaagcaaattcgatgcttggtgggggagtgacagaagctcgtctgtagaaataaccggaaaaacgggtgctaaacctggaactgattatgcttcgttaacttcgcatcccaaccagaaattagcagaggaaggatggaaattctggagtggcgtagagttccattttatacaaagctctttcgggtggagtatgccgacgaagccgaatacgtcgtttggtaactataggcattggtcttttaattatattccaactaaatcaatacaagatgtgtttgctgctaatcgcgataaatgttctaatgtaacagaagacggtacttatcaattgtgggtacaagctggttccacaccgggagacggacttggtgcgagtagagattacggttcggctgctgtatatattggaagaggcggttcaggtgcttctacccgttttatacacatcaatccgggaatgcgtatagaaatgagagtgcgtgtgacgggagatcgtacgggtattgtcccggtcattgagcttagagatgcacctgggggcgtatttgataaacaaacacagagaatcgatattcttagaaatacgaaaggaaacttggtgacacaaggtgttttctcgacaatggaagatggtactaaaacaagcccactcccaaaaattggtgattataatatttattgggtagaattgactacagatggaataaaagtaggaatcaatggaagtacgaatgtagatgtcccttcgacaagttcttggggttttgctcctgcagatggcttggctttggatttcctttttgctccggcagacaatcgtccggacggatgggatagtgtattgaaggctatttccgaacctaagaccgatccgaatacacctatgatggaaattgattggattcgtttttatacgaatagcacgtattcggacgaaggtgtgacatactgggcaaatgcaggtcaattattctactaatattgtgttctgctttcaatagattaattgataaaatgtcggaagtcaggtgtttatgcatctctttcgacatttttcactcttaaaagttttattaccatgaagaaaaaaatcttaattattttcatgctattgatgtctttgattagtatgcatgccgccaacttgacatctccccctatttcaatagttccccgtccggcgcaggtcgtgccgggagagggcaactttaccttctcttctcaaacgctgttttcggtagagaaccatgagcaggctgtcatcgtccgcaactttataaacttattgaagagaagctcggggatcaccccacagttggcaataggtggcagtgagaagagccatgtctgctttacaaccgactcttctttaaaaagcgaagcctatcagttggcagttactccggaacagattcaggtaaaggcatcggatataaaaggctttttctatgcattacagaccatccgcctattgttgccgtcggctgttgaaggcaatcaacaggctaagaatatccgatggagtatccccgcagtaaccattcaggatgagccacgcttcggctatcgggcattgatgctggatgccgcccgtttcttcatccccaaggaaaacgtgttgcgtatcatcgactgtatgggcatgctcaaaatcaatacgcttcatttccatctcacggacgataacggctggcgattggaaatcaagaaatatccccgcctgacggaagtgggagcatggagagtgaaccgcatggacgttcccttctatttccgccgtaacgccgaaccgggtgaactcactcctatcggtggattttatacacaggaagatattaaagaaatggtctcctatgctgccgaccgccagatagaaattatccccgaaatagatatgcccgcccacagtaacgccgcactggctgcctatccgcaactggcttgccccgtagtagacagttacatcggagtaattccgggtttgggcggaagtaattcgggagtgatttattgtgccggaaaagatagtgcatttacattcttgcaagatgttttagatgaagtgatggcaatcttcccttcgcgatatattcatctgggaggagatgaggcgcagaaagggtactggaaaaaatgcccgctttgccaggaacggataaagaaagagcatcttgccaacgaagaagacctgcaaggttactttatgaaacggatgagcgactatgtacgcagcaaaggacgcgaagtgataggctgggacgaactgacaaacagcagttttctgccggaaggcgttatcattcaaggctggcgcggacttggtacggctgctttgaaagccgcggaaaaaggacatcagttcattatgacccctgcccgcatcttgtatctgattcgttatcaaggtccgcaatggttcgaaccccagacctatttcggaaataacacgctgaaagacatctacgattacgaacctgtgcaagcggactggaaaccggaatatgcttccttgttaatgggcgtacaggcatctatgtggacggagttctgcaacaaaccggaagatgtcgactatttagtgttcccccgtcttgccgccctggcggaagtggcatggacacagcctgaacacaaggactggactgcgtttttgaaaggactggatgcctataatgagcatctgacagctaaaggcatcgtgtacgcccgttcaatgtataatatccagcatacggtaactccaaacaacggagttcttgaagtgaaactggaatgtatccgccccgatatggagatacattatacgacggacggcagcgaacctacggcaacttcaccgctctacgaaaaaatagtgcctgtaaaagaggcgcttaccctaaaaggtgcaacttttgcgcacggcagacagatgggaaagacgttgatacttcctgcccgatggaatctggctaccgccaaacctgtactgggaaccaatccggccgaaaagctcctgacgaatggaatacgcggaagcctgaagtattcggatttcgagtggtgctcatgggcggacaatgactctgtctcttttacgattgacttgctgaagccggaaatgctgaacacgttgatattgggatgcatcacgaacaatggaatggctatccataagccggcatccgtgagggtggaagtttcggatgataactccaagttccgcgaagccgttgtgcagagcttcacgtctgaagagattttccgtgaagggaattttatagaaaacctgtcattgaaactgggaggcacacaggcccgttatgtacgtgtgaccgccaaaggtccgggagtttgtcctgcatctcatgtgagaccgggacagacatcgagaatcttttttgatgaagtgatgctggagtaagacaagccaggcaggtatggagggcgacgcataagcgcggattattttttaagtctagtaaggtggcgattgattaaataggctatatatagcttgcgtgttggacatatagatccaacacgcaggtcatatatgccatacacattggatctatatgtccaatatgtacggcatatatggcttgcaagtatctgataaacagtgttattctaccaggctctttgctctttccaatgctacattgatattcgggcagatattctcttttcccagcaactcgtagaatccggctttttccagtacattatgcacgttctcgttgactccggaaaggataacggtagtcttttccttctgtgacatttcgcagagagtagtcaggttgtgaatccctgtggaatcgatgaacggaaccttgcgcatacggatgatacgtactttcgggcggtctcccagttgtgtcattgtctcttcaaacttggtagcgataccgaagaaataagggccgttgatttcgtatacctctatgcctttgggaatcatcaggttttcttcgtgtacggcaatatccgattccttgttcgggtcaatctcgtcggtaatcaccgagattttggtagtctccatgacacgcttcataaagaggacgcaggcaatgaccaatcctacctcgatagcgacagtcaggtcgaagataacggtcaggaagaacgtgataagcagtacggtaacgtccgatttcggattcttcagtaaagctctgaatacacgccatccgctcatgttgtaagatacgatgaccagtacgccggcaaggcatgccatcggaatatattgtgcgagtggcatcaggaagagcagaatcaacagcaatactactgcatgaatgattccggctatcggtgtcttacccccgttgttgatattcgtcatggtacgggcgatagcacctgtggcgggaatacctccgaacaaaggggctatgatattggctgctccctgtgcgatcagttctgtattggaatcgtggcggtcgcctatcacaccgtcggctacagtggcagacagcagggattcgatagctcccaatacggcaatggtgatagccaccggaaacaattccctgatagcttcccaatccagcgcaggcacaacggcatcaggcaactctgatttaatggtgaagcggtcaccgatggtctggatgcagtcgattcctccgaaggttttcatcaggtaaacggctatcgtgactacgatgatagcaatcagcgaaccgggaattttctttgagaacttcggagtgatggcgataataataatgctgacaatactaacgatggtattccaccagttgatcgtgtcgaagtgtcggaaataaatcagccacttcccgacgaagtctcccggcactttctcgtctccgaaagataaaccgaaaatatcggcaatctgggtcgtgaaaatagtgacggcgataccgctggtaaatccgacgatgataggataaggaatgaatttgatgacagctcccagcttgaacactcctaataatacaaggagtacgcccgccattagcgtggctacaatcagtccggcctcgccgtattgttgtatgatgccatagataatgacgataaatgctcccgtaggaccgccgatctggactttgctgcctcccaacagggaaatgatgaatcccgcaatgatagcggtgataatacctttttcgggcgaaactcccgaagcgataccgaaagcgatagccagtggaagcgctacgatacctacgatgatgccggccatcaggtccgccataaacgtttctttcgaataattctttagacaagaaaccagtttgggtttaaattcaaatagcttcatttttatatgttgttatacgtgtactctgttctttttttgcaaagtagaggttgcaaaattatataaaataatcgaaataagtatgtttttgaacatactatttgcctgttgatagatttcatcgatgagccgatagtttttattcattaagaaaaggtggcttattatgaacaaatctcttatatttgcgttataaatagtacgacaagttacgtttggtaatcaaccaatttaaaatataaatagaattatggctaagagtattaaaggaactcaaacagagaaaaatctgttgacttcattcgcaggagaatcacaagctagaatgcgttacacttattttgcaagtgtcgctaaaaaagaaggttacgaacaaattgcagctatctttacagaaacagccgatcaggaaaaagaacatgcaaaacgtatgtttaagttcctcgaaggtggtatggtagaaatcacagctagctatccggctggcgtaatcggtactacacttgaaaatcttcgcgctgctgcagcaggtgaacatgaagaatggtcactggattatcctcactttgctgatgtggcagaacaggaaggtttcccgatgattgctgctatgtaccgcaatatctccatcgcagaaaaaggtcacgaagaaagataccttgctttcgtgaacaacatcgaaaatatgactgtattcgctaaagaaggcgaagtggtatggcaatgccgtaactgcggttacatcactgtaggtaaagaagctcctgaagtttgcccggcatgtttgcatccgcaggcttatttcgaggtgaagaaagaaaactattaatcaatagatgaatagataaatcttggatgatttagataaagaaaatgccgcttacagtaatatgcaagcggcatttttcgtcaccgaaaaaacaaattgctatcattttactctctcatcctgtttgtagaaggatttgtcctttctattaatcaaagaaaagatgcttcactacgttctgactatgttttgaacaaagtgaatgacagattggtaggatttacttatttttcggatagtcttttgggtatttaaacaagagttatccagttatcctttatctattgattccggtaatccttgggagatacaccgtattgctttaaaaactcccgatagaaataagatttattagagaatccacatttgaacataatctcggatacggtcaacttggttgtccttaataacttggctgcatattccagtctgatgcctcgtacaaattcactcggagtcttatctattatttctttgaacttccgatacaaggtagctttgctcactcctacaaattcggcaatagaagaagggcttaataactcatcatctatattattctttatgaagtctgttacattctgtattaactcttcgtcttccggatgaagaacaatcccgtcttttactttcacagaagacatgctggaattgaaatagtcctttaaaagcatttgtctcgacagcagattctctatggtggatatcacctgcctcgggtgaaatggtttgacgatataagcatccgcaccatggttaaaggcattaatctggtcttctacagaagcctttgccgatattcctatgattggaatataacttgttttcaaatcggatttcaatttattaatcaagctcaagccgtccatattgggcatgacaatatcacttataataatatcaggatgattatgttctatctctttcaaagcctccacgccgtcttttgcttcgtgtatcacataatcaaagaggacatctttcagcaggtctctgatattcttttcatcttccactatcagtatgacagtatctttgcgaggggataagtgatcctgcccgttcttttctttctgcaacgaatctttttcatccgttacaacaagtgaatgatcggatggcaaagaaggaatcacgactgaaaattcaacactttttcccagttcactatttacacttatctgcccgcctaataattcaaccagactctttgttagatttaaacctatgccattgctgacagagttacccaatttaggagtatcaaatatcttatacttatcaaatatctctgccatctgttgttctgttaatcccttaccggaatttcttacgagcaagtataaggttttatcaggctcattttgtgatatctcaacatgaatatatccataacgaggagtatatttgaacgcattcgacagtaaattgaatataattttttccaaagcattgcggtcggaatagatctctgacgtatcatgagtctctaccttgaagtctattttattctctttcaggatatccacataattgttggaagcatattccatcaatgattttacgttcacattttcaggatgcaaatccatattgctcgatttagttttacgaaactccatcaactcactaatcagcttctgcatcctttcggcattattctttattatttggagatatttctttgtactaccatctaacccgtcctgttccaacaagtgctgtgcaggtgtataaatcaaagttaggggggtaaagaattcatgtgccacattggtgaagaaattgagccgggattcataaatcttctgttcatgccgtttctctacctgggctataagaacctggcggcttaaccgtatgcgatttttgataacagactttgtgatgtagaagataataatgcacaatatggcatagataatcaatgcaggaacactaagccaccacggataacctacttttatagttaagcgataaatgttatctccccatactttgtcgccattcgtgctcttcacttcaagctggtattcacccggaggaagttgggtaaagataatattcggattattacccatccccacccaatcatccgagtggtttttcaagcgataagcatattcacagttttcattattaataaagtctttggctatgaaattgaaagtcatgaatctttcttcatagctaagtttcaacactccttttctgattcgttcattaatgtcctgtaccgtattatatatcttcaaactacttaatataagtggaggattaaactcgcgcaaatgtatatttcgaggattgaaataactaaacccgcttactcctccaaagtacaagaaatcacgatgatccttgaagaaagctccatccgagaattcatcattctgcaatccgtcattcaaagtataattatctattttattgttttttacattcaggctagacaatccctggttggtactgatccatatctttccttcgtggtcttttaatattccatgaattgttttattattcaatttttcgtcggcatattgtatcaggtgaaaatcattctcctcctttttcaattcgttcagtccataacttgttcctatccatatattggcatcatcacgcagtaagcacaatacatcattattggtgagtaaaatccgactgtccatatcctccaatgattttatgctgttatctttcatattgatacagttcaagcctccgccacgtgtgccaaaccataacatattgtcttccggatcggatgtaatggcataaacaacatcgttattcaatgagatattcttatccgacgaattatattgcctgaatcctttaacgtgataacgaccttgctctctggaaatatttattttgattaagccatatcctgatgttcccacccataaaagagaatcattgttcgtaaaataaatgttgtacacagccttgaaaggcgggtatttgtcaggtatctcaagcttttccagttgccccgtagcagcattcaatatattgattccggttccttccgttccgataaaaatgtcattcgctttatttctcctcaaggcatagacagaattggaaatcaatcctttactctcatccagataatctgtcaattctttcgttgcaggattcaacagttttattccgcttccttttgtgcctatcagaatattaccatcttcatcttcacagaaacatctcacagggtgactggtgtgaacggtttcaaataaagagtcgtaatgataaagttgaattaatccttgtccgtccgttcctatccacaatatgttctgactaccggaataaagagtgaagactgataactgactggatagttcgttcaggtaggtaaaagtattcttttttaaatcataatgaatacatcccccttctataaagctgacgtacatcttgttctctgctaaaataacctgcgatacaggtttgccactatccagctcaatgcattgggaaactgtaaagtcgggatttaaaaggaaaagtttgttgtctttgtttaagataaatctgtctttcgacagaaatatcttatctacaggcgtctgtatgtcgactgtgcgtaaatcactctgttttcctccgttaacgagtagattgtaagtcagatgcacggtatttccattatttaaaaggaaaagcatacgatcggaatcactcacggaataatcctttatatgacttgcaaagtctgtgttaatcggattaaactcatcttcagaatcattgtagacaaagaaccccagcccctttatgaggcagataatatctcctgccgcactctttcctaaaataaaagacttttcctgattgggtactttattatctgttcttaaataataccttgttatctgacgggttcgtttatctaaccgattgattccattatctgttgctatccataaactgcccttacattcgataatctggcggataacgttattacttatagaattcggattgtttttgctatatctgaatgtcgtaatttctcttccattatatgcattcagtccatcccatgtcccaatccagattgtatgttctgcatcttccaaaatacagtttactgaattatttgtcagtccgttaacatttgatatgtgttttgccacattaaaagcataagactttgtggaagtgacaaatgcaataatcagaataaaaaataattgtgcgtataagatgtttctcatgtaaatgaatgttatttatacggttaggataatagcaaatataaggaatttattttattccgcgcatattttcatcggtaacggaggatttatacaattgtggaatagtcaatccgaattacaaacgataatctacgatttcaccgtcaacaatcaatttaccatgtttctttgtctttttagcggaagcaggaatacaaacaatagttacggcattgtccgggttcaggataatgcttgtttcgccggtacaattcttctttatgtattttttggataccagatcgtacaagtccgtaggttccgtaaagtgttgattcaaagttacctctttggcttcaaaataaggattgaataaaagataagtaggatattttcttgtggaataaaagtctgtgacattacaatccaattgaagaatacattccacattagtagtatctacaatagaggctagcatacccacccaggccgagccatacaagcaaatatctgtagctgaagacatggtttttacttgatccccaatagcatagggaccctcatcggacaataatccctggaacggttcaaagtgattgccatgatacaagtccttcctcaatccttcataacaaatgacgtgttgaggatcaccttcccagatagaactcgactgacggttgcgggggtgctcgtctgcataaaataagcggcaggcgtttgccaggttcagcatccacttgcctattgtggaagcataagccgggttgtattttacaattgggacaagtgcggcagcttgtgaaaaggtgttcatggcaaaagcatattgttcatcctttttttgtcctaccaatccgtgtacgtcgtatttgttccaacgctcacacatcactccccatccgtcacggtctgaattattaccgtcgaagcaccagttcagcattttcagctcatcataagtagttccaagttccgcattcatgcgcactgccagataagccccatagggcatcattatctcatagaaagtaccttctttctggggacggttttgcaagaatgccatgcattggcgtgtagcattcagatactttttatctccgtatttaatccaggagatgtattgcaaccaagcaagtcctgcggctgcatccggctcgcgccatattttattatgataccctttacggttcttaaagttgaaggcggtgaagttgaagtccagatattctctaccttcacttaagtcctggatagcagcataccaattgtcgacagtgatcttcatcggctcctgcatctctgttttttgaggatataaatctaccagcattgaataagccattgccggccatatctcataccagaaactttctccggctttcctgtcgagtccgttcaatataagattggttccattcttcttgttgaagaattgccgtatcattgatacataatcttttccgtcatcattgcttttgtctactcctatcagacttgcactaatgagtgagcccatagtgggaagagattcataagaatttcctcctaaccgtcttttatctacgtagcttggaagtccgaaagtacggaatggaaagtttacttgcgaatcgtcccaccagataagaggcaggttctgtcctttggcgttgaaatcgtaaaatagtctgtcctgtttcgtggctatatctttccagtttttcattttataggggaaaggtatattgggcatatactgtactaagcggatctctttttgctctatcggcttttgtgccggcaggttgttgagaaagaaaaaacctgctacgagaaataataatgtctttttcatggtcagttggttgttaaaaaagggcggattataaaatccgccccctcattttattcatattaaaaacccggattttgggaaagaatattgttgctcttatccctttcaccttgcggtatcggaaacagataatctctgtcgtctctaaaattggcacctttcgaggtattatatttggttgcataagcacgcataacggttccgaaacgtttttgtctcatcaggtcatcccgtctccatccttccattgctaattcacaacgacgttccttccagatgatttctttcagacgctcttggtcggtttctgttatgtcgggcagtgtattagttgttgtagcagggatatacgcctgttgatctcttctcggatctatcggattagttttgcgggctctttctcttacatcattcaggtaaggaagtgcaagccctggttttccattttcgtttaatacttcggcatacatcaagagaacatcggaataacggatcaaacgaatgttgtaactaatcatccagacgtcgaaacctgttttttctactgctggcacagtcatcttgtaatcatgataaccgcttggagattcagcattgtcctgcgcttcagtatcacctttatatctatcaccggtttgtgtgaatacataagtaatacgtgggtcatctgcgtcaaaggcatcatggagatcttgggttggtacgtgaaatccatatccttgataaccggagatgcgtctgcttgtgaagaagtgagggacattggtacctgtggctatgtttttgtcatatactttgttggcaatctcaaatactgattccgaactgttttcatattcagtgcgccagttcatgccgtaatcactcaacaatgtatagtctttgtctacttcaataatatcatgaagtaccgtttcggcagaggtaaaatcacctttgaacatgtatgttttagcaagcattgttttagcaaagccacgtgttgcacgataagcatcatcttcagagtaatctccttttgcaggaagtgcggaggcatcagttaaatcatttacaatacattcatataccttctccaatggggagcggggtatttgcagtatttcagcgggttgcatcggcgtagtgattagaggcacttctccgaatgtagtgaccagacaatagtacccgaatgctctcaatgctttagcctcgtttgcataacgtttcaatagttcttcgtttcctattgcatcaggagcataataaatcacatcgttacagcgattgattaatctgtacagaatctcccaacgacgtcctacttcaccattggttgtgtagatcgtaaagtcggacaagtcgcgtacttcggcacggtcaccgtcatttcctcctcctttcagtgcatcatcagtgctgcaatcacctacaaaataatgatttaatgcatattcattccaagttgtacgtaattgaagataagctcctgtcaaggcttgttcaatatcgctttccttctgataataattatcgcttgtggttttaccataacttggttcgtcgagagagcagctatacaaccccactccggcaagagcccagcatattataaataatatttttctcataatgtaatgtctttttagctagatttaaaattgcaaattaactccaaaagtgaatgtacgtgaagacggataacgtgtagtatccactcccatatccaatgggttattgatacccagttccggatcaagtccggaataaccggttaaagtaaatatattctgaccgctcacatagaatctacaacttgaaaacagtttgctcttctggcaaatgtgactcggcagtgtataacctatttgcatattctgcaaacgcaggtaagaaccgttctccacatagaaagaagaacctctcatattattgttagagtcagagttggttatgcgtggatatacagcatccaaatccccgtcttttgtccatgcttttgtgtaagcatccgccaacgcattctggcgtcctgctgaagcaaggcttcctttagcaacgttccagatgtcatttccaatagttccctggaatgccatacttacatcaaagttcttataactgaatcctaagttgaaaccataaatgaggtccggattaggatcaccgataaaagtacggtcatcatcatcgttcaattcgcctgattctcctaatttggcaaacttaaaatcacccggttgtgcattaggctgaatcttggtaccatttttatccacataattgtctatctcttcctgattctggaatattcctatttgtttgtatccccagaaacgtccgataggacctcctacatacgtacggctagtatttccactcaaatattccgatgtaagtttggttacttctgtcttataagtagacatgttcagccctacattgtaattaaagtcttttcctatctggttacggtagttgactactatttcgaaaccggtattcttcaagtctcctgcattgaagaaggggctgttagggaaggcgccaaaagaaggaataggcatattcagcaacatgtcacttgttttctttacataaaagtccatgctaacatcaaggctgtttttaaagaaagacatatctaaaccgacattggtttgctggctggtttcccatttaatatctgcatttcccacataagtcgggacgtaaccttgtgagtacccgtttccaaagtaccattgattttcattattggtaccaattaacgtaagaggtgcgtctctgtcgattcgttggttaccattctgtccccaacctacacgcagttttaaattggaaattgtattttcaatgttcaggttcttaaagaattcttcattgctcactctccaacctaatgaaactgatgggaaatagccccaacggttacgtttggcaaatcttgaagaaccgtcggcacggaaattgactgtagcaaggtatctgtcatcatatacatagttgatacgtcccaagtacgacaacatagaagatgtttctttacctcccgaggtgttatctccagctgtttgtgcatcaagtatctgatagatttcatcgttacctaaagcctttctcttaaatgcattaatgccttcgctgctgttcttctcataagtcatggcaaccattgcatccagtttatgcctgcctattgtcgtgttgtagttaaggcgttgttccacctgataattagaagtaacagcgctattattattcaattgagtttctttattatatttactttcctgattcgctaagttatcttccgaaaaagtagacgaatagacaggacggaagtctttgaaagtatcatggtatctttcgaaactatactgtacccgatagctcaatcctttatacaatttgatttgggcaaacacattaccaaatacattgaatatgtcattgtatctattaggaagttcgagcatggctaccggattagggtcgtaagaccactcggtaggcgcatatttgttatattcgtaattttcagaagacggatctaccaacgggctgataacaggggtaaaaggatcagctttttgaatgaaatcgaatgaaggaattgctcctgcgtcacgttttcttatctttgccagattgacattggcgccaacagtgataaatttgttaatatcatattcaagattcgctttaagtgaaagtcttttgaattcagtagtgatgattgcaccctgatcgtctacatatcctaaacttaaagaagatctcgaattatctgtccccttacggatgcttagattatagttctggttgaaagctgtacgggttacttcattccaccagttggtattataacctttctgatactgattggtaaacttatccttcattgagttttgaaagcttgcatcattttcatacgctttcatgatgaagttgtagtattggtcgctgttcatcatgttcaatgctttataactgttttttacacctacataagcatctaatgttacagtcgtttcacctttcacccctcccttggtagtaatgaggattactccattagaacctctcgaaccatagatagcgcaggctgaagcatcttttaatacttccatacgttcaatatcagatggattcaggctgctgatgttatccatgaactgtccatcaactacgtacaatggattgttgtcattgacggtccctaaacctctcacgcggatcactgcatccgatcccggctggccggaactggcggcaacaaatacgccggctgccttacctgtaagtagttcggatgcattggatattgcatagttcttaatatccttactacttatagaagccaaagcaccggtaaggtcactctttctttgagtaccgtaaccaataactacaacctcatccaatttattatcagacactagatttacattgtacgttccgctatttgttacgtttacaatttcagttttaaaaccgacatacgagaatgaaactttatttgacgatacttttaatgtatatctaccgtcaaaatcagtgatagtaccattggtcgttcccacttcaagaacagaaactccaattaaagcctctccggtattactgtcgtataccacacccgaaatactcttggtttgctgtgcaaagacatttgtgcaaacagcaagaataagaatgaataataataaatgcttactcatagtttatacacttagatttaattatatgaaatgatattttgtttattcgcgataatcttaccatctttcagttctaattctgttccggcaggaagttccacaattactcttgcgtcgttggctgggatctcaacggagccatttgtctttatattttttgctatatattctttggcaacaatatcaaacaaatcgcatggttgggtagcttgataagtaatggttttggtctctttatgagggttataatagagatagaccggataaggtttctctgtatagaagtctgtgacattacaatccagccggaggataccctccacattcgtttgacaaacaatggcccctaaaataccaacaggagaagaactgtaaacgctgaacatgctctccgtcggattaccttttatccatttgggaccatcgccgattgcaaccggattaaccccttttaatgatgcttttccatagtcatccgtttttcgtaaaccttcataagaaacattatcataagtaatgtccttcaattcaggagcccattgatgtgtttcatctatttcccccggatagaacaaacgacatgcacttgcattgttcaacatccacttgccgatagcttttgcatattgaggctgatatttcaccatcggaatgaaaggccaggcaggtttgatactgttcatgaggaatgcatatcctccgccgtctgtgatacttccttgcagaccacttacatcatagtcaccccattttcctacaataattccccaaccggttcttcctgtagggcttttacatccgtcaaatacccaatcaagaagtttggctacatcatagttggctccttctactgcattcaaataggctgccgtataaactccgagtggtaaaagggcctcgtaaaaacggctttctttttgggcaagcagggcttcgatggcacttttactatgttgcagataacgtggatcaccaaacttatgataagcacacaacaatacataagcatgcccaccggcggcgtcttgttgcaatggaatattattaaccattcctttcatttgtgcatagtcaaaataagaatagtcgtaatttccattcaatacagaatctgctttaacaaactgctccgcaatacttttttgtatcttctctgccccgtctacattggggaaaacatcgcaaatagcataatataaggcattgggtaatacatcataccaccagtcgcggccatagcctcctcctaaaagggctactgacggagtcgtattgttcatgactatattccagccgttatcagagttgaaataattctgcaccatttttacatagttatatccgtcttgattcgtcttgtcaatccctacaaggccggcaccaagaatagctgccaatgagttcagactttcatggaactctccgttattggcattttttccctgacgaatatctttaatggcagtatataagccaaatgtagtctggtccatatttctgcgggcgtcatctaaccagattaatggtccgacttcgcttttattattccagtcaaagataaactggtcatacttttgggctttttgcttccagtccagcattttataagtttcaggcatatcaggcatagagtctaccctatggatggaaacctgctttaccttttcaccaaagttattttcgttgcccgagcaagatgccaggagacaaacggtcataagtacaaaaacacctttacttgtcattttcatgttcaatagtatcagtttgattagtaatattcttagctaaaggatatgccgctaattgtaatccggcaacaatcaccagcgcatatttcaatgcaaaatcctgcgatacacaataagcaaggaagataaacagtagtaaaccgaaagctcttccaaggaaaaggccgaactcatggcttaggatatatgcatattcgtttctattctcaatctttgcaactgcatcaattgttctcatcataatggggaagtaagccaggtcgaacaaaggctggaatatcactttgcaaaggacgaaaaggatcactcctgtagcagagaagagaataccgttgaatagtgtaccgacaaagaatacgattagtcctcctacaaatattttcaaacggtcttgcgggcgggccatacgtcctaatacatacaccaggacagcagtcagtgccccgctaactccctgaatcaatcctaacgctccttcatctcctaccagcttcaatactaatatagccggtgccgttactaaaaaaccttgaaccattcctttcaatccggctagccaaagcatctttttccaaagtatgttgaagcggaaatagaggaagttcgtttctttggggttctcgaatttacctttccacagtgtcatgcaggcgataacggtaatgactactgctgccatcgtaactacacagtaagaggtattgatattgaagaggaatccgaaaacttcttttccatctatctggctgataaatgcgcctataattaaaggaacaccgatggaggtaatagaaaagaagaaagactctagtccgaagaaatagttacggctgttgtcgttggtattatagagagccagtaggtatcggttggtccagaagaaaccagaagctgctcccattaaaaagccggccagaccaagttcgacgaagccaagtgacttgatagtcatcataccgaacatggaaatgccacttaccaggattcctaccgaataaagtgtcttcacactgtatttctttagcagataaccgttaacaagagaggtagtaatgatgcctatatacattgccagctgataaaaagcaaccatcacggggtcactcgtgtttctcatgatataggctcccacaaagatttctactatcggtagtaccaatgcataaagcatattggtaaccaacagtgttctcatgttaggttcctgttgcttaaagaacagatattcttttttcagtttattcattacttctcttgtgtctgttttaatacgtttaatatctctgaaatggaaagctctgccttacaaatcacttcatcgcttgctccataatacatggttatcgtatcgccgtccactaaatgcccattagtgaaaactacatttccgaagaaacctgtttgctcataagcggcgataggttccatgataggttcttcgcttcttgcaatgactttcgacgggtcatttaaatcgagtaataaagcccccaagcaataacggtgattaaaatcggctccatgataaatctccagccagccttcttctgtctttattggagctgcccctgcccctacacgtgcgcaatcccacattccgtcacgagtggttgccacacatttgtggtttccccaatgcaagcggtcgggcgattctgccaaccatatataattgccgccaagttcgggactgctcgggcgatgaagagcgaaatacttgtcacctatcttctgttcgaacaatgcacaatctttattatgcggtgggaatatcattccatgccgtgtatagtttttccaatcattggtgtgaatcagtccaacccctacagctaccgacgatacttctgtgaaagtaaggtaaaaaccatcttcggttgttgcaacacggcaatcctcaatgccgaatgcttccagctctccttttccgaaaataggtggaaattccggttcatctttgaagtgaataccgtcggtacttgaaaccaatcgtaagtaagacatcgtagtcagataattctttcctttgtaaccgataacgcgtgggtctgaagcatctaaatcgggatcattctttaaaaacgaaaccacttctatttttcctttttcattatatataggaaaactgataattccttctttctgtataggtctctctgcgacgcgcaaaagtaaccaaattttgccttgatatttgaaaactccgggatttaacaaacatgtaatttccattccgttgattcccgcttttaaatcttttggagccagtagggggttctgctcacatcttttagctatatccataatatttcgattagtgattatttctgtgaacaaaagtatgagatgaaagacaggaaagcgtttactatattctcaaagaagtgtacacatgctcaagaacatgtttttaagagggtgatattagggaatgattttagaagaggcagtgatattcgtatttataggcttttactatttaaacatttgatttatagataaatatgcggtgtattgtagtgtattatattctcataagtgtatagtatagtttctttgaggagtgcaaaagaaacatataaagataaaaaaataagaggccaaactcaaaaatataatttgaggaagcctcttgtttttttctttttaataaaaataatactgtaaatcctatttcttcacgtacggataatctatcgtatataatctgtcagagtttgtttgatagaggtgaagccgttaaaaaaaaattgttagacagcctcttttcgttatcggtttggtatactgtctttataaatagtaattgtcctttttcttgttgaatcattcttgatactggttacatctccccgggtcgtgaaatacacatagtttcccagatcgagaaaacggtacactttcactccgtcgtgctcgaacagataactgacttcataagtctggttattttctgattttccgcttttcagtggaatacctgcatagcaggaagctagtcccgttatgcagaagaaaagaataaaggtccgaatcaatgttttcataatcatttcttcacgtgcggataatcaatcgtataatgcaatccgcgactctccttacgctccattgcctgacgcataatcagataacccacattcaccatattacgcaattcgcagatttctctggacgctacgctacgtttgaacaggctttcagtctcttcgtagataatatcgagtctgtcccaggcacgtttcagacggaggtcgctgcggacaatacctacatacgtactcataatctggttcacttccttcatactttgcgtaatgagcaccatttcttccggagaacgggttccttcgtcattccattcgggaatatcttcattataagaatattgatcgaccacttgtagactatgtttggcggcagcgtcggcatatacgactgcttctatcagtgagttggaagccaggcggttgcctccatgcaatcctgtgcaggaacattctcccacggcataaagacgttcgatggaagattgtccgtccaggtcgacaaggatacctccgcagagataatgggcggccggggctaccgggatataatctttcgtgatgtcgatgcctaggctaagacatttttcgtagatattggggaagtgtttctttgtttcttcgggatctttgtgggtgacgtccagatatacatggtcgtctccacggttcttcatctcgttgtcgatggcgcgtgccacgatgtcacggggagcgagcgaaagccggggatcgtatttctgcatgaactctttgccgtccattgtgcgcagtacgcctccgtaaccacgcattgcttccgttatcaggaaagaagggcggtctcccggatgatacagggcggtagggtggaattgtacaaactccatatccttcaccgtacctttggcacggtaaaccatggcgataccgtctccggtagcgactagcgggttagtggttgttttataaacagcccctactccaccggtagccattagcgtcactttagcaagataggtatctacttttcccgttttcggatcgaggatataagcaccataacatttgatgtccggtgtttggcgggttacagtcactcccaggtgatgctgtgtcaggatttcaatggcaaactggttttcgatgaccgtgatattcggatggcgttgtacggctttaatcaggctgtcctgaatttccgctcccgtattatctttatggtgaagaatacggaactccgagtgtccgccttcgcggtgcaagtcaaattcgcctttctcgtttttgtcaaaatccactccccacttaatcagttcttcaatttgtgcgggagcttcgcgcactaccttttctactgcggcacggttactgatccaatcgccggcaatcattgtgtcttcaatgtgcttgtcgaaattatccaccagaaggttggtgacggaggctacacctccctgggcgaagtacgtattggcttcttccagcccacttttacagataagagcaactttacctttgtgcgccactttcagcgcaaaactcataccggcaattccggaaccgataacgaggaaatcgaattttcttaccataatcttgttatttctcaccgcaaagctacaaaataagttacttcgttgtacttttcgttgtcactaattcataaaattgctaccttgcaggcaaaaatctgacaaaatgaatcgaatttttcatgctcgcatcgcctggtaccaatatttcctgttggtggtgcttactgtaaatgctgttggcgcattgtggtgcaaatatatcttggtggcagtactgtttatgttgatgctgattgtagtgatcgaacaaattatacacactacttatacattgacaacaaatggtgatctggaagtctcacgtggtcgttttattcgcaagaagatcatcccgctttccgaaattactgcagtcaggaaataccattccatgaaattcggccgtttctcggtgacggattatatcctgatagaatacggaaaaggaaagtttgtttcggtgatgcctgtcaaggaacaggaatttgcagaactactcgaaaagagaatgttcgcaaagaaaataaaggccacggaggcaatagaccctgtaggctctcaagcggatgaatcgtagcgtgttttgataataatgaaaagattaactgattatatactatgaaatatcaagtaattatcattggtggcggtcctgcgggatatacggctgccgaagctgccgctaaaggtggtttgagcgtattgcttatcgaaaagaatagtctgggtggcgtctgtctgaatgaaggctgtattcctacgaaaacattgttgtattcggcaaagacttatgacagtgcaaaacatgcatcgaagtatgcagtcaatatcccggaagtctctttcgatttgcctaagataatagcacgtaaaagtaaggtagtgcgtaaactggtgctgggagtgaaagcgaagctgactgccaacaatgttacaattgtatcaggagaagcgcagatcattgataaaaatacggttcgctgcggggaggaaatttacgaaggggagaacctgatactttgtacaggctcggaaacttttattccccctattccgggagtggatgcggtgaactactggacgcacagggatgctttggacagtaaagaattgccggcctctctggctattgtaggtggcggagtgatcgggatggagtttgcatcgttcttcaacagtttgggagtacaagtggcggtggttgagatgatggacgaaatcctgggtggaatggataaagagctttccgctttgctccgtgcggaatatgcaaaacgaggtattaaattcctgcttggtacgaaagtggtcggcttgtcgcaaacggaagaaggagctgttgtttcttatgagaacgcagagggaaacggcagtgtcattgcagaaaagctgttgatgagcgtcggtcgccgtcctgtgacgaaaggtttcgggctcgaaaacctgaatttggagcagacggagcgtggtgctatcagagttaatgaaaagatgcagacttctgtgccggacgtgtatgtttgtggtgacctgacaggattctctttgctcgcccatacggctgttcgtgaagcggaagttgccgtacattccatcttgggaaaggaagatgccatgagttatcgggctattccgggcgtagtctataccaatccggagattgccggagtgggtgaaacggaggagtcggcctcaacgaaaggaatcaattatcaggttatcaaacttccgatggcttactccggccgttttgtggcggagaatgaaggcgtgaacggagtctgcaaagtattgctggatgaacagcagcgggtgattggcgctcatgtgttgggaaatccggcttcggagattatcactcttgcgggaactgccattgaactcggattgacggcagcgcaatggaaaaagattgttttcccacatcccacggtaggagaaatcttccgggaagctctataaatggattccgatatctggcatcgttcattgatgcgggtatcttactgataaaatcgaatatatgatgagaaaatatataatcactccggccttattggcaatagtttgtatggtgatgtgtcattgtacatttaatcgtaaagcgtcagttgctgccaatgaatatttgattcagggcgaattggccaatcttcccgacagcattgtgatcggcctgtatgaagaagacggaaatattctcaactgtgtcttgagagatacgcttatgaatggacagttctctttccgcgacacggtttctaccacacggaaaatgctgattatgtctgataatcggggcttcccgggtacatggctggaagtgtggatcgcaccgggagaatacatcgaaatcaagggacaggacaaactagtgaaaacatgggaagtagtaagtgatgtgccggaacagcaggaagaaaaccgctttacggcttgcgcgatggctcaacagaaagaactgatgcaatacatggcagcggaatatgactggcaacggatgatgttcatagaccatccgggcgaccgggagtttgaaagccaggcctgggccaaaatagattctatccggaaactgtcaatgccgttgcagcaggaaatctggaaaaaggaaatggaatacatggaagaagcgcccgtctctccggtgtggatggacagattattgttatttgcttccatgatgaaatatgaaaccatcatgccttataaagaagaggtaaaaaaactctatgcccgaatgtccgaagccgataaacaaacagatgacggacaggagattacaacctatgtttatcctcccactacagtagggattggagatatgatggtggatggagacctatatgatgcgaatgattctctccgtcatatttccgagttcaaaggaaaattcatcttactcgatttctggagtagcgggtgtggtccttgcgtggagtcgatacccgaaatggagaaggtgatggatctgtacaaggataaaatgactgtgattagtattagtgaggacccgaaggcacgttggaaagagtatatcaagacgaaaggaatgggcggtaaccagtggaacgaacttcgtaaaggacgtaccggtcttgccctaaattatcaggtacggggaatccctcattatgtattgattgcccctgatggaaaaatccaggatgtatggtccggctatggcgccggttcgcttcttggacaggtagagaaaaacttgaaatagatagaggtaagatacgatcatttgttgatgtcataaacagtgttatatgaaaaaaagtcttttgttagtcgccctttcagtttgtttgttgccactttggggacaacagaatttctcccggatagattcgcttatcaagaagatgctccccgaagcatccgaagtcggcatatccgtctacgatctgacggctaagaaatcactttataactatcgtgcggagaaactttcacgtcctgcctctaccatgaagctgttgacggctattaccgcactttcccgccccgaagccaacgagcctttccgcaccgaagtatggcacgatggcgtgatagagcatgataccttgcaaggcaacctgtatgtggtaggcggattcgatccggaatttgacagccagtcgatggattcattgatagaagaggtaatcactttccctttttcggttattaacgggcaggtctatggtgacgtttcaatgaaagactccctttattggggcagcggatgggcgtgggacgatacacctgcgggttatcagccttatctctctccgctgatgttctgcaaggggactgtacaggtttccatagttccatccacggtgcagggcgatacggcaagtgtttcctgccagcctctgtcttcctattatacagtgacgaatcagacgaaaacaggtacctcttctgccgggaaattctctttcacaagagactggctgacgaatggaaacaacctccttatttcgggtaatgtcacttcgattcgaaaagatgatgtcaacatctatgattctccccgtttctttatgcacactttcctggaacgccttcgtgggaaaggaatcacgactccccagtcgtatggctttgccgaattacctcgcgacagtgtgagagtagagcgtatggcttgctggaacacttctgtgcagaaagtgctgaaccaactgatgaaagagagtgataacctcaatgcggaagcatttctctgtcgcctgggagcgcaggctacgggaaagaagcaagtagctgccgaagatggtattgtcgaaataatgaagctgatccgccgcctggggcatgacccgaaagattataagattgccgacggttgcggactgtccaattataattacctctctcctgccctgctggtggactttctaaaatatgcgtactcgcaaacagaagtgtttcagatgttgtataaatcacttcccgttggtggggtggacggaactttgaaattccggatgaaaggtactcctgcttttcggaatgtttatgccaaaacaggctcgtttacggcaataaatgcgcttgcaggctatctgaagatgaagaacggacatgaagtggcatttgccattatgaaccagaatgtactttcggcggctaaagcgagagcatttcaggataaggtgtgtgaggtgattattgggaaataggctgatatgaatacattagcccgtacaaccaaagtggaattccgttgttgaatccgatttctatgttgtcaagaggcaggtactattttccatggagggctctttattgattcttctacaaaaggacaattgtattctctaataagcaaaaatcgtaggattttgtttaccagagaatacaattatacttgttttgaatcgaatactgtaaattctatactctatattatatttactttgagtattcagcccaattagtattcttcatatcgccactcttagccaactctgcgtgcataccaagtgcagcctgaatagcgtgtggggtctgtgcccggttaccggccagtttgaggtaatcccaaagaagctgtttgtagtcaggatgtgcacagttttcgatgatggcttgtgcgcgttctttcgggctcttgccacgaagatcggcaacaccttgctcggtgataacgatgttgacatcgtgctccgtgtggtcgtggtgggataccatcggtacgatcgcgctgatcttcccttctttggccacagacggacaagtgaagatagagatgtaagcgttgcgggtaaagtctcccgaaccaccgataccgttcatcatttttgttccgccgatatgggtagagtttacgttgccgtacaggtcaacttcgatggctgtattgatagaaatgataccgaggcggcgtactatttccgggctgtttgagatttccgacggacggagaaccagtttgtcgcggaagaaatccatatcgttgtagatgccttccagacagtcatttgtaacagtcagtgaacaggcgctaccgaatttgatgcgtccttcgcgaatcaatccgatcacggaattctggattacctctgtgtacatttcgaatgcaggaatcgttttatcacgtcccaatgcaccgagtacggcgttggcgatgtttcctacacccgattgcaaaggcaagaaactggacgggataataccgcgtttcatgtcggctgcaaggaagtcggcaacattctggccgattttgtcggtcaacggatcagcggcagcgaaagaacgcgcttcgtccggccagttggtttccactacgcctataatttttttcgggtctacctgaacgtaaggcagtccgatacggtcactcggtttatagatcggtatttcgcggcggtaaggcgggtcgagcggttcgtatacgtcgtgcatacccataccggatttgctgtgtgcgctattcaactccacgatgatctggtcggcaagacggcagatggtcggggcgatgccgccggcggcagtcagataaatttttccgtccggagttacttcgcaggcttcgatgatggctacgttcactttgcccatgaacccgtagcgcacttcctgtgccatttgtgagaggtgtatgtcgttgtaggcaatctctccgttgttcacagctttgcggaagtcggcgttggtagtataaggagcgcggtagcggatggctttggcacgtgacagtacgccgtcacaggattcccctgtcgatgcgcctgtgaaaattcctacttgaaacgggtttcctttcgcatgttctgcttcagcaatttttgcgagttcggctgttacagccttggccgttccggcgggagtaaatccgcttaggccgatgttgtagccatgtttgattaggcttgcagcttccgctgccgaaatacgattgagtgacataaatagtaaatttcgtgttaaatacagttgatatttttattgataattaattctctgtttgtacggccttgtaccaatgcttggcaatgactcgtcacataatgattcgaaactcaatgagtttacgggctctctcaatacttccgttgaagtatctctccccagataatagcgcggcgggcttcttctgcggaatgaatcgtgaaatcatgttcgttatcagttgattcggtgtgagagttataatgagaaccttgttgggaatttcgtttatcttgcgcggcactgtttgccagggatgcggaaacggatatttcttctttttttcttttctgctgcgccgctggtttcgccgtctgtttgggagactgttgcggtggcgtctgtttcaggggtttaggctggaataattcttccagcgacttggggccaccccatgcctcgggcataggaactgcatccggagctacttcaacgggggatggcattggggaaacggggcgtttattcttagcttttttcgatttactattcttattcacctctttgaatattcccacaagaatgacacctgctatcaagagaaatttcaaaaaatcttccattgtgtttcactgctaattagttatctgccaaagttacgtattttatctggttcaggctaacattttattatgaaaaaagggcagcttcacagctccccttaatttttttaacctaaaccttaactatgaaaaaatctaatgtttctttcattgcacaaatgtgaaaaataaatttaaatttgccaagcatatcgcctaaaaatgtttattctcttaacataaattacaaatttgcttgccaaatcataagtttttgcgttattttgatatcaattcactacttattgaaagcgaagccgtatctttgcatccgaatttttaaactaagatttgagtatgaacgaattaacgggagcggactttaaatccgcaactgaaatgaaggatgacaacaaaaagttgtttatcgaaacctatggctgccagatgaacgtagccgacagtgaggtgattgcctcggtgatgcaaatggcgggttattccgtagccgaaacgctggaggaagccgatgccgtgtttatgaatacctgttccatccgcgacaatgcggagcagaagattctgaatcgcctggagttttttcactcgctgaagaaaaagaaaaagcatctgattgtaggtgtattgggctgtatggccgaacgggtaaaggatgatctgataacgaatcatcatgtagacctcgttgtggggccggatgcttacctgacgttgcccgacctgattgcggccgtagaaaccggtgaaaaagcaatcaatgtggaactttctactaccgagacttatcgggatgtgattccgtcgcgtatctgcggcaatcatatttcgggttttgtatccatcatgcgtggctgcaataacttctgcacctattgtatcgtgccctatactcgtggacgcgagcgcagccgtgacgtagaaagcatcctgaatgaagtggcagacctcgtggcgaaaggctataaggaagtcaccctgttggggcagaacgtcaactcttaccgttttgaaagaccgacaggcgaagtggttactttcccgatgttgctccgaacagtggccgaggctgctccgggagtgcgtattcgtttcacgacttcccatccgaaggatatgagtgatgaaacgctggaagtgattgcgcaagttccgaatgtgtgtaaacatatccatctgcctgtgcagagcggcagttcgcgtattctgaaactgatgaaccgtaagtatacccgtgagtggtatctggaccgggtggcagctatcaaacgtatcatccccgattgcggactgactaccgatattttctccggttttcattctgaaacggaagaggatcatgccttgtcactttcgctgatggaagaatgtggatacgatgccgctttcatgtttaaatattccgaacgtccgggaacgtatgcttccaaacatctcgaagataatgtgcccgaagaggtgaaagtccgccggctgaatgagattattgctttgcagaaccgtctgtctgccgaatccaaccagcgttgcatcggtaaaacgtatgaggtgcttgtggaaggtgtttccaagcgttcgcgcgaccagctgttcggtcgtacggagcagaaccgtgtggtggtgttcgacagaggtacgcaccgtgtcggtgatttcgtcaacgtgcgtgtcacggaggccagctcggctacgctgaaaggggaagaggttgctgcggattagtttgttgcagaattttaggaccgaacaagtgttgcgtggattagcatagactattccatttaatatacttctcactgtagaggatgcgaagggcacagagttagagaaaagctctgtgtccttcgtgttttctgcactctccatattcttcatatcttgcgtgctctctctatggtgagacttacatcatcatgtgccttctgatggagaacttcacaatcgccatcgcattgatggacgcgaatggaatatccatcggctcatgatgagtattatagctcacgagcttgagatacccttctttttccgaacgattcacgtacttcaccgccagatactcgtctccgtcaatcataaacgacaccaggtatatttccccgtaaatgacattatcgaaactgctgatttctttatacccgataatgtctcccgatttcaatatagggtacatgctgtctccgttgacgtagaccgccccgtcgcagacggatatattgggaatccatattttccccagtgcatattgctgcttgttggtgaataatgttttcaggttcgccgccgccgtaatatcgtataatgtcacgctacggtcgtctataggttctggtgttttcggattgtgtataatctccacttctccttttaccagttcgctttcgcaaaatctcggctggtgtttcggattcccttttcctaataatagccagttgtagtccaccttgtccccgaatttgtcgagtaacaggcggaaatcaatgctgtttcgtgcaccccagttggatactgtggcacgtgagactcctaaatattcagctaattcgctgtcgttcttgaagtttagcacctgtttggcacgcttcacaattcctgtgacatctaaaaatgtatccattttatgatcgtttatttttgatgtaaaaattcataaactcgttaattgctcattgataatctgttatctactttttgaaagttaatttccaaaatcttttgttttctttatgaaatctgttttatatttgtagcaacgaaatcacaaatatatttcaaaaatataaattttaaatagaaaaaccatgagaaacaacaaaaagtttacgaaatgttgcaaaatacctcattcaccgcctttttaaggaaaccgtgccggacgggcagaagtaatagtaagcctgcttgcagcgtctatatatcttgcatataagatctatatatcctgcgtgtagcatctatatacccaatgtgcagccgatatatctccaatatacagcaactatatgtcctgcgcgccagcgatatatcttcaatatacaaacaaatatttaaatatgaaaactataaaaacggaaaagcaatatggaaaccattatgaacaaatctctatgcatctgcggatgttgcaagcgggagcttccacaggaagccttttatatgaaccaacgtacccgtactacggacaactactgcaaagaatgtcgtaaggcaaacgcacgcagacatcgcaatcaggataaaagtatattatttgaaaacaaatctgtttcctatccggtgataaccgaggtgaaggactacgctttgcggatgttccttatccgtcatgcccggcaagtggtgtcggacagtatccgccggaagcaggaaaaggaaaaactacgcgcactatgggaagaataaaacaggggttggattatttccccatgagcaccagtttcatgcacgaccgtatagtgcgtcgtgtcatgaaacgggaaggtgatgccgcttttgccacattggtagaaacgctgtcgtacatctatgccggaaaaggatattatatccctgccagtgatgagttttacgacgaactgacggacagcctttacaatacggatcttgatgatgtgaaacgtatcatcgccctggccgtggagtgtggactgtttgattccgggcttttccggcaatacggcatcctgacttccgccgatatccaacggcagtatctctttatcaccaagcggcgcagcagctcgttgatagcccccgcctactgcctgttggaagcggaagagcttgcatcgtaccacacttctccaaacagcaaaaacagtgcggaggatgctgataacaaaacaggctgtgatgtaacaccaactgctgatactgtaacatcaaccaccgattctgcaacatcggaagccgaaatgtcgacattgggtacacaaaacaaagaaaaacaaattaaaacaaaccaaaacaaattaaaccacctctctgactctcctcaaggagagaacggaggaggaaaaattttgaaaagaaggaaggtgatgacacaggaagagatcgacaatctgcaaccaccgtccgacggcacgcagcgtaacttcgagggactgctggagaaccttcgctcttataagattccgccttccgagcaatacgccattattctgaaaagcaacttcggagctatcggaaacccggtgtggaagggattcagcaacatccgtgggagtaatgggaagatcaaattgccggggcattatcttttgagcgtaattaattaatttatgaacgcactttgaaaaaatgattgggtcagtctgaataatacccgtatctttacagtgtcattaagcttaaggacaaaactaaactaatttattaacacgtaaaaactattacaattatgccagtattgtacaaacccttccagtcagttctggaggacaagaacaaaaagaaattatttcatccccgtgtgatttacacggccaatgtgtcaaccgcccaactcgccaaagagatagccgcttactcgtctctatccacgggtgacgtgaagaacacgcttgataacctggtgacagtgtctgcacagcatctgcaggcatcggaaagtgtaacgctcgacggcttcggaactttccgtatggtgatgaagtccaacggtaaaggtgtggaggtgccggaaaaagtatctgccgcccaagcttcccttaccgtccgcttcctgcccaactacaccaagaatcccgaccgtaccaccgctacccgttctttggtgacgggtgccaagtgtgtccgtttcgaccttgccgatacttcggcttccggtggcggagatagtggtaaacctgatggtggtggctccggcagcggtggttccggcgacggcggtggagaagcaccggatccggcagcatagtctgcacgtaggtcgcaacacaaacacaaatggctgactaaacgactaaacggagctttttaactagactagtaaactaaactaattatccactaacatgcgaattattaacttaatcgtggtgcactgtagtgccacgcggggggattgtacgctctctccggaagatttggaccggttgcaccggtgccgcggattcaacggaacaggttatcactactacatccgcaaggatggaacagtgcacctcacccgccctatagaacgcatcggagcacatgcgaaaggtttcaacgctcactcgataggtatctgctatgaaggtggtctggactgccggggacgcccggcagatacccggactccggcacagcgagccacacttcggcaactcgttgggcaactgcaagagaaattctccggctgccgggtatgcggacatcgggatctttcgccggatcttaatggaaacggtgagatagagccggaagagtggattaaacagtgcccgtgttttgaggtggcaaaggaattcaaggaacttgaggagtttgctatcaaaacagaaaatacggaagaacacagagtaacacaacaaattaaagaacagaaaggaggtaaatgatggcaatgaagaaatcagtatgggatatgatcctgaaggtggttatcgcagtggcttcggctttggctggcgtattgggcgctaatgcgatgaatttgtaatttttcaatagttctatcattttataattctgcagattccggagtctggaatctgcagaatttcaaaccaatatttcaacacagattaagactcaaactaaatgctatttcctccgttttttaaccatttatataacaaaaacaaaatatgaaacgattaatttttatactatcatttttcgctgcactctttccttttacggcacatgcagcttctacagctccatacgttcccctttctgtccccacttctccgcaggcggcagccttcaaaatgtatggagatgtggccgtgaatcctgccatgggggtgcccgacatatctattcccttgttcgacatcgatcatcacggctatcggttgcctttgagcttgaaatacaatccggctccgttccatcccggctacaactatgacgtgttcggccgtggctgggcattatctatcagcagttgcatatcgcgaagcatagaatgcatgcccgatgaacttaatgactttaaactggataccgacaagtttggagagtcatatcggaacttatcggaagaatacctgaacacgttggaactaaagtccgacctatttaccgctatccttcctgatggtagttccttcgaattcgttatcagaaaaacctatgacggcaaaatcgaatatgtagtttcaggtggacgtgatgtgaagataacccatgctactagggatagaaagattatatcttttaaagtggtggacgaacagggtgttgagtatgctttcaccggtgccgataccacctttagaggaacggggtgtacgattactccctacaacaccacttatgtgtcttggcaactaacctctatccgtttgccccattcttcggaacttattacttttgattatggcaagagtattcattctaactttgggtatcagcaggcagaaccggcagtacgtttccatcatttttacgagttagggtgtagtccggatgtatttgacgtcactgtacatacttatacacggcagcatgcatatcagatgaagcttctgacttccgtcacttatggtaccaccaccatccgcatcaattataaggacggtacaaacagtgaatattataattatgcccaaagtatcagtataaaagacggagacagacttgtgcggaccatcaacctggaacagcatcagggcactttgcaatctagcagtttatcaaagtcgcctttcagtatgcttgacagcgtcactctgcttggcggtaatgatgcatcatccgagacctatcggtgtggatatacatcttcgtatgccaactttggtggaacagaccattggggtaacctgaattttcgcagcaacaattatgacgtggcctatatgaatctgttcgtgggctttgatgtgtccagagccagtagctcttttgtaacagacgtaccaaaagacgaaaatgatttgtctcctttggataaagtgagactctctaatgtgccctacaacacacgtaaacctgccggccctgaaagccattgtgtactccgcaaattaacctatccgacaggaggctacacagagtttgaatttgagaaccacgagttcttctcattcacagatgatgatggagactatattcacgataaaaaaaggcgagtgaagaccaaagctacaggtttcaggattcgtgaaatcgtcaactatacggcagaaggtgtacgaagcgattccaaatactactgttacgggaaaaccgaatacgaagaaaacggctgggaaatcggacgctactatcatacaggcgcaggcgaaccaaccctcgatcctaccattcagacttatatgaactaccaatcgaccgaacttccaatgtcggtactgaacatggttttggggcttgatccggatgggcaatatcgatccttcaaatccaatcccttcatgagttatagtccgtcaggaggatatcctgtttacacctgggagtgggaatgtacgttcagtgcgttcaatttccagcggcttctgaacggccgtcccgcagtggtctaccccgaggttacggtctattatttaaaggatggtgcaacccaatttagtcctgaaaactgcaatggaaagactgtctatcaatatgacatctatgaagcaatgctaaatgacacggcctttttcgagaaaccgcagtactatggcaatgtgctttggtatgaaggagagaaatatcgttataatctattgaaagaacagactgactacatgagcgacggacgggaatataaactgaagcgacgcgagtcactgatttggcgttacggtggctcgccggtgatagactgggaatattccaattcatacggaaccccatattttgtccctataaacgctgttcttggcagtttctatacttctacctgtcagatgcttggacactcacttctatacgaacgtaaagtaaccacttatgacgaatcggaaacaggtgttacagatacagagcactacagctacctctccggtaaccgaatgcaatggaaagaacggaatgcaggaggcctgcatcgggagactaattgggaatatccggctatcgcgcgaactggtacaaccccggatattgttcgcaaaatggtggaaaagcacatacttaaccccgtgttgaaagagatacagaatcaaaactcttataattatgaaggcaatagacgtgaattcggagagtttcctacagaaagtggggatacgctgatattgcctgcccggttttatcagacaatttacgattcgagttcacactacagcgaagtcctcgcttactcttccaacggaaatccccgcgaagtagtttctaaggataagttacacacggtctatttatggggatatggtgatcgctatcttattgccgaaatcaagaatgccactctagagcaggtggaaaccgctgtgtcctccgtctttggcatgacatcctccgcattggcaaagagcactactcctgatgtcgccaagctaaaggcattgcgcaaccatacgtctctctcggaagcacatgttaccacttttacccatcttccgttggtaggtgttacctcgatctccgatcctacagggaagacttcgtattacgactacgatggactggggcgcctgaaggcgaattactattacgaaggcaacgtagtggaggaaagcaagaaacgtgtcgtgcaggaatatgattatcattaccgtaactaataaacaaaatatgtacaaacttatgaaacgaatatatttacttctttcgctcttattgtgctctcttttatgcatgtcgcaggtgagcacttcacagaactatatcagcacacgtacttacacctcgcccgaccatagcggttgccgtgaacaggtggtatactttgacggtctgggccgtccctcacaaacggtagattgcggcattacgcccgacgggaaagatcttgtctcattacaagagtatgatgatcagggacgcaagttacgcacctggcttcctgccaagtcggcgggaaatggcaattacatgaccctctcttccttacaaagtggtgcaagctcattagcaggcggtgatgcacgtccgtacctacagaccacgtatgaagcctctcccttgaacaggccggttgcgcagcatggggcgggcgaggcatgggcagagcaccctgtaagctaccaatatatcacacgtaatccccgatcctttccctcgtcttatcatatgcttcccaacagtgatttcctaggggtctgcactaccgatgaagatgggaatcagacctatgaatttaaagatggtttcggacgtacaattctggagggacacatggatggttctgattcttgtttcgcttattatgaatataacaaccacgatgatttggtgaatgttcatccgccctttgtagcttaccacaaaaagaatgagcccgaaggaccttttgatacacagggtagttattcttactggtatgacttcctgcaccgctgcgtttacaagaagcttccggagcgtaacggcatctattacatttacgatcatggcgaccaccaggtactttcgcaggatggcgagcaacgtgctcgaggagaatgggctttctcccttagcgatgaattgaatcgtccagtactcacgggcatttgccacaattcttattattacgaagacttcccgttgtgtgagactgatgtgaaagcgcgacgggatgatacaggtactgccttttatggctatattcccgagaatattccgctgacgaatccagaagtgtatacagtgaattactatgatgactactctttcatcggcaagcacggagtacccacgtctctgaactatgtcacacctccatcgggttatggtatctgctatacggaaagcagcaaaggattgttgacaggaacagttacagcccgtctggatgctaccggtgtgaccggatatgattatgccgctttctattacgacgaacgcggacgcatcatccaaagccgggcgacgaaccacatgggaggcatagaggaagaatacgtagcttacagctttacgggagaacccctgaagcggcaacatgttcataccgccacaggatatagcacacaaacggaagtatgtacgtacgagtatgaccacgcaggacgtcttttaacgacaaagcataagctgaatacgaatgaggaagtgactctcgttgaaaacacctatgatgacttgggacgaatcaagagcagtaaacgccatggcaactctgctcttacaacggactatacctataatgtccgctcatggatgaagacactgactaccgatacgttgttcaaccagaccttgcattataacgactcatacggtggaagcagagcttgctataacggcaacatatccggcatgagttggaaagccgcaggcgacacaggagtgcatggataccgcttcagctacgacgaaatgtcacggttgaccgctgcggggtatttgtggaacggatctcccagcgcaaactatgacacctcctacacgtataacaggcagagcaacctcacttcactccgtcgtaacggacgcacaggcgcttcatcgtacggcttgattgacgacctgacgctcacccttgatggcaactggctgacacgtgtggatgatgccgccacatcgtcggcttacaacaacgggttcgaattcaaggatgccgtgaagcaggacaatgaatacacctatgacaagaatggcaacatgaccaaagatttaaacaagaatattactgatattcaatataattgtttaaattcgccaagtaaagtcacattccaggacggcaataccattacttatacgtatgcagtgaacggcacgaagctgcgcactgtgcacacgataggcaacactaccagtacaacggattattgtggcaatgtgatctatgaaaatggtgcacagaagttgttgctcactgatgtcggacatgttacgttgtccgataagaagtatcactactacttgcaggatcatcaggggaataatcgcgtagttgtagatcagacggggcaaaaggaagaggtaaaccattactatccgttcggaggcatgtttgcttcagcagataatagtattcagccttataagtataatggtaaggagctggatacaaagaatggattgaattggtacgattatggtgcaagacagtatgatgtagcgattggaaggtggaatgcggtggatccatcaagtgagaagcattacaattggagcccatatagctactgtaagaataatccagtgttgagagtagatgttgatggaaaagatgattatacagtaaacagtgcaggtaggcttttcaaaactgttgtagagggctctactaatgatagattgatgagcattagatcaggtgttgagccgataactgtgaatgataaaaaaatactttctggaatgtataatatgcaagatggtaaatcagggggtcttgaaacttataattcaacatcaagccttgaggatgcagccgcagttttcaaatttggagctgacaacacttctgttgaatggaaattggatatatataatgataagggagataaaacggctattatcggaacttcgggtagagaagatagtgtgtttgctgataaacagagtgaattgaatgtaaaaggagataaagtgatagatatgcattcacatccatataatgcccaagcttctgaccaagatatgaaaaatttgaaaataaagacaggtactgtctatcacagggatagtaaagtattatttttctacaatagtgaaaattcacgtattgggaataatgaatataaaatagatacgagtaaaacgttgttagataagttgaatgataaatttatgaagtaatgagaactacgtttctaaatttgatattattatttgttatagtaggctgtaaacagcctactataaacaaagttcagcaagcggtggaagcgcaagccaaattgcttgtggatagtggcttgattgctaatgaatatgtagtattatatgagttggctattaatgattccaaccatatatacagtattcaagcagctgattgtccggcagatttaaaatttgaatatccttcaaagatcattaagtacaaggataagtatctctgttttatagaattggatgaggcaccgatgtctgcaaaggaaatgatagaggcgtctagttattcgggcaatcttgtggtagaaggagacgggggaaagagttggcttttggttgtttccaaacttggagagaagaaaatattaatagatacttcattgcttaggggatggggcacatattttaatattaccgaattgtggccatatttttcgggatatgtgaaaggatgcccagtacagatgggggttatgtctcatgatgttgagttgagcgattcctatttaagttgtaatgtggatagtataaaacggaatttgctttggaatgagaaccagaatactacaatgataaagaacgtatatggacaaatgtatctgaaaaacaatacagattccgttgtttacctgtcatcaagtactaaaaaacattatgctgttgtagatggtcaggatagcctttatttgtcacttagtgattctttgcccattattttgggaccgaatgaaaaaaaaattttagaatataaaagtctgcctcgtcaagatgagttctttagaaatcttacgttgaaagaagatccctgggaatatttctataatctattttgcagatcaacatacagctttataaatgtaaatggaaaaaaatctcaaacaaaagtgatgtttcatgatattgataattatggatttaatgtttctatgacgtctcctagtattcaatttcagatattaaaccatggtatatatgataagaagtatggggaaatgtcgagattcagattttggtctgataaatggggtgctatgaataatgctgataagcagaggttatcagatgatgcagatgagagatttcaaagaaacgtgaatcaggtaaatctcttaccctgatacgaattgaccaaatatgttcaacttgtgtcggggtattactggtgttttatatatacgacgtttgttaccctgatatggaattagaaattattccatatcagggtaactttttatttgcttttacataaatgcggaaatgaaaggttgctttctcaatataatagattaaatttgcctaaccacatgtctgcgcatgcagaatatgtacttgatatttcagctagcctaattgtagatactgatgtcttaattggtttatctattaaaagtccttaacgaaaccccaatccatcactttttatttgtttctttgcaccaaattcgggtatagtgttgtcttgtcattcgaggcagcacttaattttgcttagatagttaatggagaaactcagtataaatgcttgtccggtgtgtggcggtgcgcacttgaaacgcgtcatgacttgtacggatttttatgcttcgggcgaacagtttgaactgtattcgtgtgaggactgtggatttacattcacacaaggagtccccgtggaagcagagataggcaagtattatgagactcccgactatatctctcacactgatacgcgcaaaggcgcgatgaataatatctaccattatgtacgttcctatatgctgggccgcaaagcgcgcctggtagccaaggaagcgcatcgtaaaacggggcgtttgcttgatataggtacaggaaccggttacttttccgacacgatggttcgccggggctggaaagtggaggcggtggagaaaagtccgcaggcacgtgagtttgcgaagttgcatttcgatctggacgtaaagcccgaatcggctttgaaagagtttgctcccggcagctttgatgttatcactctttggcatgtgatggaacatttggaacaccttgatgaagtgtggcagcgacttcatgagttgctgacagaaaaaggagtattgattgtagccgtacccaactgctcttcttatgatgctcaacgctacggcgagtattgggcggcatacgacgttccccgtcatctctggcatttcactccgggcactatacaacaattggcttcccgtcatggctttattatggcggcgcgtcatccgatgccgttcgatgcgttctacgtatccatgttgagcgagaaacatcgtggcagttcgtgcagtttcctgaaagggatgtttgctggaacgttagcgtggtttaatgctttaggacgaaaagaacgcagtagttccatgatttatgtattccgaaaaaagagataacgcatgggaaatcaaaacaaatataagtcaggttcaatcttcgacatgcagttcatcacgtcgagtatcagtacgacactggtgttgctgttgttaggactggttgtctttttcgtattgacggcgcacaatctttccgtatatgtccgtgagaatatcagtttctccgttcttatcagtgacgacatgaaagaagcggatatactgaaacttcagaagaaactgaatcaggaacctttcgtgaaacaatccgaatatatctctaaaaaacaagcactgaaagaacagacagaggcaatgggaaccgacccggaagaattcctgggctataacccctttaccgcttccatcgaaatcaagcttcattccgactatgccaattccgacagcatcgcgaagatagagaaaatgattaaaaagaacaccaatattcaagatgtgctctatcgaaaggaactgattgacgctgtgaatgataacatacgaaatatcagcctggtgctgctcgctctggcagtggtgctcacttttatttcttttgctctgataaacaatacaataaggctggccatctactcgaaacgcttcctcattcatacaatgaaactggtaggggcgagttggggattcatccgaggaccattcctccgaaagaatgtatggagcggaatactggcagccattgttgccgattccgtattgatgggaaccgcctattgggcggtgacgtacgagcaggaattgcttcaggtcatcacgcctgaagtcatgttgattgtctgtgcaagcgtattggtatttggaattgtaataacgtggctatgcgcctatttctcgatgaataaatacttgagaatgaaagcaaacagcctgtactatatttagcggatggcgaacggctgattgcaaacctgtgtttgtgtgtggttagcatccgtaacgcccggctgatagattaagagaatgattgtaattagtaatttgtaattaaataaactatgtctgacaagcagaaatttgcctttgataaagtgaactttatcttgctcgcgatagggatggcgattgttattatcggctttctattgatgacgggacctacatcgtccgaaacctcttttgaacccgatattttcagtgtacgcagaatcaaggtagcgccggttgtttgcctgtttggcttcttgtctatgatttacgctgtattacgcaaacctaaaacacaaaaaacagaagaataaagatgggggatttaacgacatttgagacgattattattgctattgtagaaggattgacagagtttcttccggtttcttctacgggacacatgattattacgcaaaacattttaggagtagaaagtactgaatttgtaaaagcgtttactgtcattatccagtttggcgcgattctttcagtggtttgtctttattggaagcgttttttccggttgaatcatacaccggctcctgcgggtgcttccgcattgaagtgttttctgcataaatttgatttctactggaaattactggtagcttttattcctgccgccattttgggattcctgttcagcgataagatagacgagatgctggagagtgtagcaatagtggcagtgatgttggtgattggtggtatattcatgctgttctgcgataagattttttcgaaaggaagcgaagatacggtgctgacagaaagaaaggcattcaatatcggtttgtttcagtgcattgccatgataccgggggtatcccgttcgatggctaccattgtcggaggtatggcccagaagctgactcgcaaggatgctgccgagttttcattcttccttgccgtgccaaccatgtttgcggcaaccggttacaaggtgttgaaactctttctggatggcggtacggagattcttgtcaacaatatgccggcacttattataggtaatgtagtagcttttatcgtcgctttgctggctatcaaattctttattagcttcgttacgaaatatggctttaaggcatttggctggtacagaattattgttggcggaaccattttggtaatgctgctgcttggatacaacttagaaattggctgatgaattttaaaaaaggagaagtactgtttttcaataaacctttcggatggacttcatttaaagtagtagggcacgcccgctatcatatttgccgtcggatcggagtgaaaaaactaaaagtcgggcatgccggaacactggaccctcttgcaacaggggtgatgattgtatgtacaggcaaggcaaccaaacgaatagaagagtttcaatatcatacgaaggagtacgtagcaacgttgcgcttgggcgctactaccccgtcatacgatttggaacatgaaatagatgccacctaccctaccgagcatatcacaagggaactggtggaagaagtgctgacgcactttatcggtgccatcgatcaggtcccccctgccttctctgcctgtatggtagacggcaagcgtgcttatgaactggcccggaaaggagaagaagtcgaactaaaagcaaaacagcttgttatcgacgagattgaattgctggaatgtcgcctggatgatccggaaccgatgattcaaatccgtgtcgtatgcagcaaagggacttatatccgcgccttggcccgcgacatcggcgaagcactccatagcggagctcacctgacaggattgatccgtacccgtgtaggtgatgtccggttggaagactgtctgaatcccgaacactttaaagagtggatcgacggacaggagatagaaaatgaggaagaaaataattaacgtaataaggaatagatatgaaattatcacaattcaaatttaagttacccgaggataagatcgctctacatcctatgaaatatagggatgagtctcgtttgatggtattgcatcgtaatacaggtaagattgagcacaagatgttcaaagatgtgttggactactttgatgataaagatgtgtttatattcaacgatacgaaggtattccctgcccgcttgtatggtaacaaggaaaagacaggtgctcgtatcgaagtattcttgttgcgtgagttgaatgaagagcttcgtttgtgggacgtattggtcgatccggcacgtaagatacgtatcggtaacaagctgtatttcgggccggacgattcaatggtggctgaagtgattgataacaccacttctcgcggacgtacgctccgttttctttatgacggacctcatgacgagttcaaaaaggcactgtattctctgggtgaaactccactcccccattctattatcaaccgtcccgtagaaccggaagatgctgaacgcttccagtctatttttgcaaagaacgagggtgcggtgactgctccgactgctagtttgcacttcagccgtgagttgatgaaacgtctggaaatcaaaggtgtggactttgcatatatcactttgcacgctggtctgggtaacttccgcgacatcgacgtagaggacttgacgaagcataagatggattcggaacaaatgtttgtaaacgaaatggcggtgaaaaccgtgaatcgtgccaaagataacggtagaaatgtatgtgcggtaggtacgacagtgatgcgtgctattgaaagcgcagtcagcactgacggacatctcaaggaatttgaaggatggactaacaagtttatcttccctccgtatgaatttaccgtagccaattcaatgatttccaatttccacatgccgctttctaccttactgatgattgtagctgcttttggtggttatgaccaggtgatggatgcttatcatgtagcattgaaagaaggttaccgtttcggcacgtatggagatgcaatgctgattttggacaaataatggcaaaagtttatctgggactcggcactaaccttggggataaagaacaaaatcttcgggatgccgtgcagaaaatagaagagcaggtggggaaaatcgtttccctgtctgctttttacataactgccccttggggattttcttccgataacagtttcctgaatgcagcggtttgtgtagataccgaattggctcccatagacgttttacagagaacgcaggcgattgaacagaaattgggacgtacgaagaaatccgttaacggcatatatagcgaccgcctgattgatattgacttgttgctttatgatgatttgatactttccaccacttctccttcaggagcaaagttgatcctcccccatccgttgatggcagaacgtgacttcgtcatgaaaccactggcggaaattgctcccggattagtgcatccggtacttggaaaaacgataaaggagcttacttcttctttttctccgcaataaagaccggtaaataggcaatgcatcctatcaatactgcatacagcaaatgaatctcctgaaacggcttgtcgatgaaatggcaaacaatggcgtagatagcaatcgtgaagcctatataaagagccagcaccaaaagcgtttttaatttcttatttagaatcattataaatctatttatgtgttaaatacagggcaaagatactcattatctccgaaatctctttatctttgcaaccgaaatgaaagtgtggacagatttgagtagcttgcaaccacggaaaaaaatgctaaaacacgtctgattgacgcctttcggtttatcctttgcagcactcgcctctcctactctctctcattttttaattttcaatttttaattcttaatttaaaaagatgggatacttatttacatccgaatcggtgtcagaaggacaccccgacaaggtagccgatcaaatatcggatgctgtgcttgacaaactgttggcttacgaccccagttcgaaagtagcttgcgaaacactagtgactaccggacaagtggtgctagcgggtgaagtgaaaacaaaagcgtacgttgacctccagctcatcgcgcgcgaagtgattaagaaaatcggttataccaaaggagagtacatgttcgaaagtaactcttgtggcgtactttccgctattcatgagcaaagtcctgatatcaaccgtggtgtagagcgtcaggacccgatggaacagggtgcaggcgaccagggtatgatgtttggctacgctaccaatgaaacggaaaactatatgccgctttctcttgatctggcacaccgcattctgcaagtgctggccgacattcgtcgtgaaggaaaggtgatgacttacctccgccccgatgccaaaagccaggttactatcgaatatgatgacaacggaactcctgttcgcatcgatacaatcgttgtttctacgcaacatgatgactttatccaaccggaagatgattctcaagccgcccagctgaaagctgacgaagaaatgctgtctatcatccgccgtgatgtgattgaaattctgatgcctcgtgtcattgcttctatccatcacgataaagtgttggcactgtttaatgataaaatcatttatcatgtgaatcctacgggcaagttcgtaattggtggtcctcacggagataccggtttgacaggtcgtaagattatcgttgatacttatggtggtaaaggtgctcacggtggtggtgctttctccggaaaagatcctagcaaggtagaccgtagtgcagcttatgcagcacgccatatcgcaaagaatatggttgcggcaggtgtagcagatgaaatgcttgtacaggtgagctatgctatcggtgtggctcgtccgatcaatatttttgtagatacttatggccgttcccacgttaacatgacggatggtgagattgcccgcgttatcgatcagttgttcgatcttcgcccgaaagcaatcgaagaacgtctgaaacttcgtaatcctatttatcaggaaacagccgcttatggtcacatgggacgtgaaccgcaagtgataacgaagaagttttcttctcgttacgaaggagataaaacagtggaagtggaactctttacatgggagaaactcgactacgtagataaaattaaagctgcttttggtctgtaaaacagtctgaaagcgagcttagctcattcgataagagccacaatctcaactccttctagtaggatatgaggttgtggctcttgattttaaataagttatatttaaataaatatcttttggatattaaacttcttttgccagaatttgctacttttgacctgtaaataaacggactgcctaatgaaaacaagatgttgttatcctaaacgctatttattgttgttctttagtttacttgtcagcgtaggtagcattctgatgtctgtctctctatcttcctgctcttcttcggtgaagagtccattgctactatctgctgactcattgatggaaatatatcctgatagtgcattatccattttggaatcaatttcctccccacagaaattaccatgtgctgacagagcactttatgcgctattgcttacgcaagcaaggcataaaaattatattgctttaggagatgactcgctgataaaaacggctgttgaatactatggtgataagaagaaaagtgtacgtgctgcaaaagctcattattattggggagctacttatggtgagaaggggtatacttcatttgctgtagacgagtatctgacggcaattcggttgatgcctgttagggatgaattcttagcaatgatttatgataatcttgcggactgttatgaaaaagatgaattagataatgtagcaatggaagcttatcgcgctgcttatcagatattaaaaggaaaaagtggacaaatatatccaatgcgaggtattgcgcgtatgtttttgttgcaaaataggaaggatagcgcattgttttattatcagcaagcgcttgattgtgcattggcggataaagactctagcttgataggggctctttatcatgattttgctatggtttataatgaaaaaaaagattatattctggcaaatcaatatgtatcgaaggcaattatgatacaaggggagggtgctgttaatgcttgtttgtcaaaagcccaaattatgttgaacttgaatcagcttgattctgccagctatttttataataagaatatgagccaacttgatatttatggaaaagccgtttgttatgatggaatgtatcaaatagcaaagaaaaaaggggagtggaaagttgcaacagagaatatggatatatacaaagttctttatgattcaattcagataatgaccgataatgaggaacttaatcggcttatggataaacatcaattagaagagcataaaaggttattgtcagaacatgctaaaacgttggtttttactttagttgctgtatttttctttttgatgattatatgtgtcttttgttttatgtggaatgatagaaaaagaaagaagtattatatagctttgcaacatgaattaactcaaaagagagtcgatactatgctgttgaaagacgaagaggtttcagaatctaataaagagcatatagataagaaaaggtcagagttgacagaacaacaaatccaattgtgtgtatcggtactgaaaactaccgattgctacgatcaattagagacattggaaaaggcaactcctaaacagttgttggcgatgcgtagtttaaggaaggatatacgttctactatttctaatgcatttgttgatgtgatggtaaatttgaaagagcgctacccaacattgactggtgatgatgtcttttattgtgtcctttcattgctttattgttcaaaaactgtcatgatggagttgatggatgcaacttcagatgctcttaaaacacgtaaaaatcgcataaagccttaattccgcaacactattacaaatataactttttaagtacctgagcaacaaaaagttgctcaggaatttgccatgtcagatttttcacctatcttagtgttgcaaatcaaaatatgtatcaaacccgacagacatggcaaaggtagcaattaaatccgagaaactcactccttttggaggaatattttcaataatggagcaatttgactccagactctcatctgtaatcgactcaaccctcggtatgagatgcaggctgtatggttatcaatacagcgaaatcatccgttcgcttatgagcgtttatttttgtggcggctcatgcatcgaggatgtcaccactcatctgatgtaccacctttcgcttcatccgacacttcgcacatgcagtgccgacacgattcttagagccataaaggaactgacccaggataacatttcctacacatccgacactggcaagacctacgacttcaacacggcagacaagctgaatacactgctcctcaattgcctattgtccacagggcagctgaaagagggcgaggggtatgacgttgacttcgaccaccagttcatagaggctgagaagtttgatgcgaagcctacatacaagaagttccttggttatcgccctggcgtggcggttattggcaacttgattgtcggcattgagaacagcgacggcaacacaaatgtccgtttccaccagaaggacacgctgaagaggttctttgaaaggtttgaacaaaacaagcttattatcaaccgtttcagagctgattgcggctcgtgttctgaagagatagtggaagagattgctaaacactgcaagaccttctatatccgtgctaaccgatgcagttcgctctacaatgacatctttgccctcagaggttggaagaaagtggaattgggcggcattgagtttgagctggcctccattctcatcgagaaatggaaagggaaggcataccgtcttgtgattcaaagacagaagcggatagacggcgaactcgacctgtgggaaggagaatacacctaccgctgcatccttacaaatgactacgagtcttccgagaaagagattgtcgaattctataacctccgtggagggaaggaacgcatcttcgatgatatgaataacggattcggctggaacaggcttccaaaatcctttatgggagaaaacacggtgtttcttctgcttatggcactcatacgcaacttctataaattcatcatggcgaggcttgacgtgaagaggttcggactcaaagcaacaagccgcatcaagacgtttgtctttaagttcatctctgtgccagccaaatgggtcaggacatcaaggaagtatgtgctgaatatctattcatgcaacaatgcttatgccaatgtgttccagaatgactttggataacaccgacaacttatagtcgtgattttgcgtattgcctcaagtcgcatggtggggtaaggggcatttatatgtctttatggtgacattcgatgcactgtgccccctttttactaacgatgcagattcttttcgcttctgtatcatattaggcgcgtagttgcggatttgaggtaaagaataaagtcgatgctcaacttttcgaacgtgtatttggagctgataatcagtgatatgtaatgcttaatctctgcttatcttttttttaaatagggtcttgttaccattgttaccacgtaaaaatcgtttcttttgctgcatctgtgtatttttggagctaaattttaaacccatttattatgaaagctaaatttttacctcttttattgttggctattttacttcaagtaagtatgttctcttttgcgaatgaaatgacatctgcgcgtcgaatcagactaaaaaataaaactgaggtacaacatcggtctatccctgttactcctgatgcttgtattgaaaactcattgttgtctattgaccttctttctactgttcctactgtaactgtaattataaagaatgcagaaacagatgaagttgtttatacatctactgatttaaatgtagataaggtttatattgatcttacaggtgaggagaaaggtaaatatactttggagatacaacttccaaaggaggcttttactggagattttgaattagaataaatctttgaaatatatattatttgcaactaacataatgatgatatacctaaatcattaactgatgaagccccgctgttgaaatatatggcgcattgctgaaatgacgatttagatgaccgaaaggggaaagaatcggttaacttttattcgtgggcttaataagccttgtgaaaggcccattaaggtatattgaaacgtaaaattaaaatcactttttttaattgtgtgctgaaatactactggtagggtgttcgaacgattttatagttcggataataaagttcattcagcaacaatgtgatacacctgttagtagatgagaaatctgtgatagatgtattctctgtgagaaaagctcttggacttcttattttagaagtccaagattttttttagagagagtatgatggaagaaatggctgacgaagaaaaagtgtcttttgaactattcaaatatattatttggattatttgtgaggtaatttctgtgtgttacctcttgttacttattttgtgtgatactgttacttctgttaccaagtaaaattcgttcctttccttatacctgcatacctttggcataaatctttaacacacaggcattatggaaacgaaacttctattctttttattgtcaggtattttattccaatcaaatataggtatatatatgatggagcaaaccgagaaatgtcaggttactttgaagattgctattcaaatgcactcgcattctatttctatttttcctaataacttctggaggagttcgtagatgttgcttagttggcatttacattaactgttattatgactattccaaaaatgtagaatgggatgaataattaatttatcctgttagatggatattgtcattatgtatttgggtaaaaatacttttctgagttttctctcttaaataaaaacaaatctaaatttaaccaagatgaaagaaaaattattgattttgggagcaatggtggctttgtgctgctcttgtgcggggaattctgtattattagatacggaatccgaattgaacggcttgaacaatgagtatgagctaggtacgttggaagtgagtgataatggtctaaaatgcgaaactttgggtgatgaagattctattcaggttttgaaggacaattatatcgcggaaattatgggacgtatggaagttgctaaagagaaggtaatgcgtacggcttatggtgcaacatcgcctagggtcggagttttcagggttggttcttgtggtaattacaagtatttatcaacctcaaatccgcaactacgcgcctaatatgatacagaagcgaaaagaatctgcatcgttagtaaaaagggggcacagtgcatcgaatgtcaccataaagacatataaatgccccttaccccaccatgcgacttgaggcaatacgcaaaatcacgactataagttgtcggtgttatccaaagtcattctggaacacattggcataagcattgttgcatgaatagatattcagcacatacttccttgatgtcctgacccatttggctggcacagagatgaacttaaagacaaacgtcttgatgcggcttgttgctttgagtccgaacctcttcacgtcaagcctcgccatgatgaatttatagaagttgcgtatgagtgccataagcagaagaaacaccgtgttttctcccataaaggattttggaagcctgttccagccgaatccgttattcatatcatcgaagatgcgttccttccctccacggaggttatagaattcgacaatctctttctcggaagactcgtagtcatttgtaaggatgcagcggtaggtgtattctccttcccacaggtcgagttcgccgtctatccgcttctgtctttgaatcacaagacggtatgccttccctttccatttctcgatgagaatggaggccagctcaaactcaatgccgcccaattccactttcttccaacctctgagggcaaagatgtcattgtagagcgaactgcatcggttagcacggatatagaaggtcttgcagtgtttagcaatctcttccactatctcttcagaacacgagccgcaatcagctctgaaacggttgataataagcttgttttgttcaaacctttcaaagaacctcttcagcgtgtccttctggtggaaacggacatttgtgttgccgtcgctgttctcaatgccgacaatcaagttgccaataaccgccacgccagggcgataaccaaggaacttcttgtatgtaggcttcgcatcaaacttctcagcctctatgaactggtggtcgaagtcaacgtcatacccctcgccctctttcagctgccctgtggacaataggcaattgaggagcagtgtattcagcttgtctgccgtgttgaagtcgtaggtcttgccagtgtcggatgtgtaggaaatgttatcctgggtcagttcctttatggctctaagaatcgtgtcggcactgcatgtgcgaagtgtcggatgaagcgaaaggtggtacatcagatgagtggtgacatcctcgatgcatgagccgccacaaaaataaacgctcataagcgaacggatgatttcgctgtattgataaccatacagcctgcatctcataccgagggttgagtcgattacagatgagagtctggagtcaaattgctccattattgaaaatattcctccaaaaggagtgagtttctcggatttaattgctacctttgccatgtctgtcgggtttgatacatattttgatttgcaacactaagataggtgaaaaatctgacatggcaaattcctgagcaactttttgttgctcaggtacttaaaaagttatatttgtaatagtgttgcggaattaaggatcaataaaaattgattgtgaaaacggaaatagtaaaactagcgtaagtggtaatgttggagatacgtatgttgatggtggagataatatgcgtctcgaattttgtatggtggatgcgggatttcgttatccggggggagtctttttgtttgaggatgtacctttagagaccatgacattggtccgttatcatgatacggaagatggtggtcataatggcgtgtggtctgatgatcctaattattatgatgtaatgcatatttctggaatgtctaaattagattctaatgctacattggcatggaatataaataggaatatgactaaatggggcgatattccagtgggacctgcaggtattaattatggggtcattgctcctgctgaaatggcttcaggtaatttgtattttgatgatgaagatcataataataagaattgggcacaagtttggttaggaccccaaaaccaatatgaaccgcatggtacatattatggagtccagctggatcgaaatacaagatatcacgtatgccttaatacggataaaaccaatttcacaaaattggtgcgatcagctatctaattattaatttgtttataatcaattcttattggtaaaacttaccaataagaattgatttaattagcacatagacatgaaaatattgtatttctttctcttctcttttctttttattgcttgcaatactcctgttataaataagaatgatgttgttgcagaagtgaatggagaacagattcttctttcagaattggcgtctcaaagtaaacaagagatttttgatatattgaatacagcgtatgaaatcaaaagtcgggtacttgcaggtctgatcaaacagaaactgttagaagatgcagccaaaaaagaaaacatgtctttggaagagtttatcgattggtttgttcagcagaaaatatgtgtagggcaggatagtttgaaaaaacgatatggatttaatacacaaagcttttatgtaaaaggtgaattaatcccgttagtgaaaggttctttggaggagaaactatcttatcaacagaaacttcggagtcggattgttcaggcattggttgattctttatatcaaaaggcggatattaaaagatttttatatcctccaaaacagccggaatgtgttgtgagggatttgtgtgtatattatagggggaatttagactctcctgtttcttttattgttgcctctgattataattgtgagcgctgtgtacaatttgaaaagacattgtccaagctctatgataattataaagagcgggttaaatttggttttgtgcattttgcagatgctccttcgttagcagctttggcatgtgaggctgctggtgagcaaaaacaattctggacttttcatgatactatatttaactattcaggagtagcagattccgcttttatatataacttagcaaagtctaaaagattgaatatgacagaatttgatgcctacttacattcttctgacaaatataaggagatggataaggtcatcaatcagttagtagaaagggggctgatggctactcctaccatcataattaatgatcgtttggtgtacgtcacaaacagctatgaagaattgtccagactattggagtatgaactataacacaaaagataaaagatgagactttactttaatctgaataagataacttatctgtttctaatgcaggctttatatctttgtattgcttgtgaggagccgtttgatgtaggtatgccgatcccggaagatgccatagtatttgatggagtgataaccgatgaacccccaccctattattttgtattaagtaaaccgtcaactaaactgaaataccctgaaaatcgtagttttgataggattaatgatgcagaaattgttattgttgatttgacaacaggtataagagatacattacagaatgccaaattgactggttatcaggattttcgattttatgatcactatagagataaagatgttactgtttatatgaaatggcttcctggtgaaacgcctggtggactttatgttactaataagatttatggagttgaaaatcatacctacgaacttcatatcaaatacaaaggaaaggaatatacagcatgtgagcggatggtgcctaaaactccaatagacaaaatagtaatgaaacgtattgatactggagaaggtgaacctaatgaaactccatgtatcagtttttataatcctcctgaagagcataactattatttgcttaaaacagatttttgttcttcaaaagtgcttcgtgtcgcatctgtttataatctatattatggaacaacgaatagtgccggttggccatattctattttggatgatgaatatttggcggaaaatgtgatagactatgttgtgagcgagggagagcagtttgtactccctaatcgtccggggtttagctatcctgtaagtgattccatttggataaaaatgcagtccatatctgaaaattgctatcaggtgtttgatcaaatgattaagcaaatacgttcggatggtggaactttctctccgcgtccgacctctgtaaaaagtaacattgataatggtgcttatggaatattccgtgtcagtgctatctctgaaatctatttttataagaaacataggatttgatggaaaaatacctgttattatttatattatcctgctgtggaaatttcaccatatgtaatgctcagacgattactgtcagaggtcgtgtgaccgacagaaaaaccggagaagtgctctcggatgctaacattggagacctgatgtcgagaacaggagtagctgccaatacgtatgggctatattccattcgtattaaaggtggacgttgtgtcttaagatgttcgatgctgggctatgtaacccaaatggatacgttgactctgactgcaaattcggttcataattttgctttgatgcccgataactatcaactaagtgatgtagaggtaatgggaaatcagaaagcaggaggacagttgacattgaaccagaaagatattcaggcacttcccactttaggaagtgaacctgatgtattgaagtcattacaatatcttccgggagtcattagtggcaatgaaggttccaataatatatctgttcgagggagtaatcaatggggtaacttgatattgctggatgaggcaatggtttataacccgaatcatgcattgtctttcttttctgtgttcaataacgacgctatacagcaagtgagtctttataaatcttattttccattgaagtatggtggaagaacttcgtctgttattgatgtcaaaatgcgcgaaggaaacaatcaggagaaacaccggagtgctacaattggagttatcgcttctaaaatccagttggaaggtccgataaagaaagggaaaacatcttacctggtagctggtagatttgcttatccgggagctgtacttaacgtactgaaacagtttcgtggtactaaaatgagcttttatgatgtaaacgccaaaattaattctacattaaatgaccggaaccggattttcttttcagtatataatggcggcgatcatactttttttaatcagctggtacgcggttatggcatgaactggggaaatactaccgctacttttcgatggaaccgcgtctggacagatcaattgtcgggaaacttcagtgctatttttagtaattattattatcgctataaatcaataacggatggaatgaagttcttgtggaaatcgaatatccaatcttatcaattgaagtatgatgcggattatgctgttaataatgcgttacatatcaggagcggactctctgcgcatgtgtttaccacaatgcccggaagtattagcagttggggggattttagtaatgttgttccctaccggatggacaggcggtctttattggatatggcagcctatggagaagcgacttataaaatttcatcggcatggcagttgaatgggggaatccgtttacctgttttttacactcctaaagttggagaactcaaacaaaagtgttacataatacctgaaccgagagccgagttgttctacttccccggaaccggaaaccgtttgcacgcggctttcacgcagtcttcacaaaacctgcatatgttgtctaattcctctgtgggtattccttctgatatgtggatacctgctaatggacaactgaaacctgcagtgatgaagcaagtggctttgggatatgagagaagcctggcgaaaggaatgtatactctctctctggagacttattatagaaagaccaaccatatcgttgattttgtagataatgcgaatatctttttgaataatcagatagaaacacagttgactactggttactcaaaggcctatggagcggaattttatatatctaaaaacagtgggcggctaaccggatggattagctataccttttcacgtgcccggaattatattgctactcttggagataaagaatatccgcctgtctatgatcgtccacatagcttgaagatatttctgaattatgaggccggacgtaagcggaggtgtgcttttgcagctaccttctcgtacaattcagggatgaatctgacattgcctattgctcattaccgggtgaacggtacagctttctatatctattctacaagaaatggttatcgtgctcctgcctttcatgaattgaatttatccatgacttgtaaaactggcaaaagaggtcgattgattctttctgtgatgaatgtatataacagaaaaaatgtgtttactatctatacgagtagagatgactatgatttctctgatattggcatgcataaaatgtatttgtatggtgcactgccatctatctcttatcaatttacattttagttagtttgaactatagtctgttattctatgtttttttgtacttttgcactcgttacaaccataaaccccgtaaagagtgatgaaccagataaattccgtatgcgtatatagcgcttccagtaccaagatagatgctgtttactttcaagcagccgagactctcggccgtctgtttgccgaacaccatatccgtttgataaacggagctggaagtatcggtctgatgtgctctgtggcagatgctgtgttgaaaaatggcggtgaagtgaccggagtgattccccgcttcatggtggaacaaaactggcatcatactggactgacagagctgatcgaggtagaatccatgcacgaacgcaaacagaagatggccaatttgagtgatggtatcatcgctttgccgggtggatgcggtacccttgaagaattgctggaaattatcacttggaaacaattggggttgtatctcaatccgattataattctcaatacaaacagatttttcgatccattgctcgaaatgcttgaaaaagcaatcgatgaaaactttatgcgacgccaacacggtgatatatggaaagtggcgcagacaccggaagaagcagttcagctgctttatgagactcctgtatgggatatttccattcgtaaatttgcagcgatatgataggtgatacactaagttcccagaacacggataccttgtctcttctccagcagaaacagattagtccggcaaaggcagacagtgatagcctgcagttggccgatcttcatgctgtacaagaggttgattctggctttgaaggaacccctatctcctactctccccgtacggatgatgctattgcgctgacattgctggtttgcttctttctctcctccattgccttggcacgtggaaagaaatttctctcccaacaggtgaaagactttgtgttacatcgcgaacggacgagcatttttgatagctctacggcggctgatgtgcgttatctccttgtgcttgtattgcagacctgtgtcttgtcgggcatcacatttctcaattattttcatgatacatgtcctgctctgatggaccatgtatcctccctccttttgctgggtatttacgttggtttttgcctcgcttatttcttactaaaatggttgctttatatgtttctggggtggacgttttttgataaaaataagacaaatatatggctggaatcgtattctgcgctcatatattatgtcggatttgccctttttccgttcgttcttttcctggtttattttgatttgagtctaacgaatttggttataattgggtctattattttaattttcactaaaatattgatgttttataagtggataaagcttttttttcatcaatttagcgggcttttcctattaattttgtacttttgcgctcttgaaatagtaccttgtcttttactgtatcagggtatgattcaaatgaacaatattttgctaataaaattttaggacgttgaaaattaaaaaagtactagtgtcgcagcctaagcctgcgtcagagaaatctccctattacgacatagctgaaaagtatggcgttaaaatagatttccggccctttattaaggttgaaagtctttcggcgaaagaatttcggcaacagaaaatttcgattctcgaccacactgccgtaatattcacttcgcgccatgctattgaccattttttcactttgtgtactgaattgcgcgtgacaattcccgaaactatgaagtatttctgtgtgacggaagctgttgcattgtatattcaaaaatatgtgcaatatcgtaagcgtaagatcttctttggagctactggaaagattgaagacctgattccttccatcgtgaagcataaaacggagaagtatctcgttccgatgtcagacgtacataatgacgatgtgaaaaacctgctcgacaagaacaacattcagcatacggaagctgtgatgtatcgcacggtgagcaacgactttacaccggacgaagagtttgattatgatatgttagtgttcttcagccctgccggagtgacttctttgaagaagaacttcccggattttaatcagaaagagattaagatcggaacgttcggatctactaccgcacaggctgtacgtgacgcaggtctccgtctggaccttgaggctcctacggtgcaggctccgtcaatgactgccgcacttgacatgtttatcaaggaaaacaataaataaacagagtgggtatatatactttgtgtaaagccgaaaggctgaatagtaaaattttgatcggaaagatgtttgaaggcggtgtttctaaatcgttttccatctttccgatacgcgttgtatatatgcctgtcgagcagggcgaggctcctgcttccatattaatcagtgtatcgaaacgtcgttttaaacgggcggtgaaacgcaaccgggtgaaacgccagatacgtgaagcctaccggaagaacaagtctcttctggtggatgaactgcaacgccgggagcaacggttagccgttgcctttatctatctgtcggacgagcttgttgctactgccgagctggaagagaaaatgaaaatagcgcttgcgcgcatctccgaaaaactattctcatgaaacctcataactcccggatatctaccgcgtgggtattcgttacgggaattttgagaaaggtattttccttcttcctgcttgttcccatctatttttaccggatttgtatttcaccccttactcctccctcttgtcggttcacgcctacttgttcagcgtatgcgctcgaagcaattaagaaacatggtcctataaaggggctttatcttgctgtgcggcgtattctgcgatgccatccctggggtggttccggttatgatcccgtgccttgagacaactgaaacgagaaatagaaaatgaaaaagaatgtgactgatattttagatatccatactcataaacaggaagttgatacccaaggaaaatccatcatcaattatccgttattggcagactctccattgtatatgcctctggcagagaatgtggaagtggctgtgggtagaggatcttattattctattggtattcatccttgggaggtgagagagagtaatgtcagtcagcaattgagctttcttcaacagcagctacagagaaagcagtttgtagctgtaggagaggcggggctggataaattggcaaaagctccgatggagcttcagttagcggtgtttaaggaacaggtaaagttgtcggaaaagctcggtttgccgttgattattcactgcgtgaaagcaatggaagaactgctgggtgtgaaaaaagaatctcgcccccaacaaccttggatatggcatggctttcgtggaaaaccggagcaggcggtacagttgttgaagaaagggttttatctttcttttggggaatattatcccgatgaaacgatgcagatagtccccgatgaacgcctatttttggaaacggatgacagcttgcttgatattgaagatatcctgtgtcaggcagccagggtgcgtggggtagaagtggaagcgttgtgtgaggtgattcgccggaatatccaaaatgtcttttttaaggcgtaagagttgtatcttccgagaaagagtcgtacttttgtcgcacatggaattgaaatacaataaaaaccaaataattaaagagtaatacgatgaattttgtagaagaattgagatggcgtggcatgttgcaggacatcatgccgggaacagaagagttgttaagcaaagagcaggtgactgcctacttgggtatcgacccgactgccgattcgctacacattggtcacctttgtggagtgatgatccttcgtcatttccaacgctgcggtcataagccgttggcactgatcggtggcgctacaggtatgattggtgacccttccggtaaatcggcagaacgtaacctgctggacgaagaaacattgcgtcacaatcaggcatgtatcaagaatcagcttgccaagttcctcgacttcgagtcggatgtacctaaccgtgccgagctggtgaacaattacgactggatgaaagacttcactttcctcgattttgttcgcgaagtaggtaagcacatcactgtaaactatatgatggcgaaagactctgtgaaacgtcgtctgaatggtgaagcacgtgatggattgtcatttactgagttcacttaccaattgcttcaaggatatgattttcttcatttgtatgaaacaaaggggtgtaagctccaaatgggtggttctgaccagtggggaaacatcactaccggtgccgaattgatccgccgtaccaatgggggagaggtgttcgcattgacttgcccgctgattacaaaggctgatggtggtaagtttggtaaaacagaatccggaaatatctggctggaccctcgctatacttcaccatacaagttctatcagttctggttgaacgtaagcgactccgatgccgaacgttatattaaaatcttcacctccatcgagaaagaagaaattgaagcattgattgccgaacatcagaaagctccgcatttgcgtcttctccagaaacgtctggctaaggaagtgactgtgatggttcattctgaagatgattataacgcagcagtagacgcatcgaacattttattcggtaatgcgacttcggaagctttgcgcaaactggatgaagatacgctgcttgctgtattcgaaggagtgcctcaatttgagatttcccgtgatgtattggcagaaggagtaaaggctgttgatctattcgttgataatgcggccgtatttgcgtcgaaaggtgaaatgcgtaaattggttcagggcggtggcgtttcgctgaataaggagaagctggcagcctttgatcaggtagttacgactgctgacctgctcgacgagaaatatctgcttgttcagcgcggcaaaaagaactattatctgctgattgcaaagtaataatgcatgattcattcgatagaatataaaaaagtgaacgaaatatttggaggtttgcttgcaaacctctatctttgcaccgctttttaagagaaagcacataagtttggactatggtgtaatggtagcacaacaggttttggttctgtttgtccaagttcgaatcttggtagtccaacgaagaaaagccctgaaagagatatctttcggggctttttctttttttgtggatgcaaagtcacttcttaagtcattagaacgttcacatacggaacaacaacatgatgatttctatagtttggttgcaaaagcggaggaagatgccttgaagaagtatctctctattaggatgtaagaaatttgttatagcttatttgtacgtaatattgactgtttcgatgtttgccttactcatctttgaatagacttctatattgttagcaacaatatatttacatttctataataaatccaaataccgtttttaataaatagtgagagagtttattaagaacggtatctgagtttattagaaactattttcagagaattattggaatatgtgggattaatatatacaaaatgggagaaaatcaatacagattttctcccattcggatcttccatatatggaaatatatgttttgataatgtgttattatgtcttgatttttatataactcatattgcttttttctttttctgttcctcaaagatacaaaataaaaagaggaaagtcaatagctaatcttattttaatggaagtataagcagaaaacgtgcgccattggtgtagctcttgtctactttgacttctccatgtaatcgttcggctatggtgcggcatatattcagtcccagtcctgatccctgtttgaactcatccaacttcttgaagcgttcgaatacactatccatcttgtcggcagggatgcccggcccggtgtcgctgacagagaacgtgattctgtcgggatactcggtcagtgaacaatgcagatggatttcccctttttctgtgtgcttctctgcgttggtaaggaagttgataagcacttgttgcaggcgttgttcatctgtggtgatctggaaatcgtctgccacttcggaggtataataaagcttcactccttccgcttttcgatccattacggtagagagtatgagcctgcacatttcgttgcaatggcaggaagtcaggttcatggtgtatttgccgctttccagtgcggaaaggtcaagaatatcgttgacaagcgtggtgagcagttcggagttgtgttggacgagcgagctgaattctagcttttcctcatcttccaatggcagatccgggttggataataattgtgagaatcctacgatggcattgagcggggtacggatttcgtggctcatgttctgcatgaaatgagtcttcatcttgtctgcctgttcggcacggtcgcgggcaatcgtcagttcttcgttcttctcttgcagttgtctgattgattttctgcgtagataaaggtagagcgtgagggctatggcaaagaaacagaagaatatcaggatgaatttcaatatcatcagctggcgttcggattctgcctgtttagctaccataagactctgtgtacgttcggtttccgctttgaattgtgcgagctccaggttacggttttttagtagtagctcgttattttcggcgttcatcttctcgatttccacttgcgatttcgtttgctgcagttcgagcgttgtcttttgcaggtttaattgtgtgttttccagctgcaaggcttgcgcttttcttttcagttgttcgttgccgatacgcacattcagttccgacaggtcggcagtctgtatgagttggttcagagaatcctgtaaactctggagcttctgaagcgcttggtaagcgtctttgtacttctgctcttttgcgtaaatatttgcctgaaaagctattctctcatgtaagatagaggtggagtcggcgagagcatgcgctttatcatattgttggttgagtatataattgtatatcttcaacttattcagttcattccttctggtttcaccatgtttttcggtcgcttttaaacattcctgataatagcttttgaattcctcctccctgtcgagcgcgtataaaagtgtgcatttacgcagcatacaggcatatttgttggttgaagtcttggcacacttgattcctttctcggcattttcgtaggctgcttcatattgtttcaggttttgttggagcatggatatgttccagtatatataagatatatcctgctcagggagcttctcctgtgtgtataccagcgattgttggtagtaatccagtgccgtccggttttccctgcgcgcaaagtaaatgtttcccatcattcgcaggcaagtggagataccgtagggatagtcgtcggcaaatgcctgttctttagtcaattcagcctcctggagcgcacgcagggtattacctgtgttcatcaggtaattaactttgtagatgctgccaaagtagtaatattgcaggtagttgttctttcgggatatctcctgaagcctgctgattgctttctccagtaattccgttttcccattattgaaatagtagattaccggaatggtaagagcgaggcattgtgcctttttatcgttgatccggatggctttggtatagatagtatcagctatttccagtccggttgcgttgttacggtgtttagttgcctcctcataaagtagataaagagagtggtctatcttgtacggattgtcctgcgccttggttggaaggagagatccgataaaggtgaacaacaaacatatactgatatacctgactattttcatcttgattactatggatttacagtgttcttattgtttatttatggcattgttatattcgtattctttggcgggaatcacccacatccagttgttggcgtcttccgggttgatagttacggctgcgttggtcatgtagtttcctccgtcttcgaaggtgtggcgtacgatggtgtctttgcgccgtttgaagtcaaaccagctgaatccttcgccccatagttcgatgcggcggtagaactttatttcgtcgagcagtgcctgaccgctcttgtcgcaagtatattgagggtcgcgtccgctgtcgcggatcagttctttcagtaattgccttgcttccgcttcttttgaaggcgtcaggtggcagttggcttctgcttcgatgagatacatctccgaactgcggaaaagattgaaaggcatggcacctactttgtcgatacacttaaatttgaacgacatataagcgtatatttttgccgaagtattcaggtcgggatgcaacccttgggcgtaactggtgagtgcacttccgcccagaccattgtttgttataccacccgtgttataagtatattcgagcggatcgagaaaaagtcccctgcggatatcactttccggtaatgcatcgtacagttcacggttgatacaggccggataagtgcatacaagagtagaggaggagttgtatgcaaggcgtgcggcgagggatgagtttcccagcgattcttcttcactgtcatagatactccatatccattcgcggttgacggtactgaatccgtcgaaatattcatcggcattcataagcggataaccggcacgtgctagtgcagcgtaatgggcggcagtactccaatcctcacgggtgagtgcggcacgggcataggtggcgtaagcggcattcacattgattttgtgattctcgtcttctttgcgggcaattccggatgcctgataataggtgatggcctggttaaggtcgttgtaaatctgttcgtaacaggccagcatagaagaaagaggacagtcgccggtagaagatgtattgagccggagaaccaccccttcagcactgccgttttgcgaatcgcaccagcgtggcgagtagaactgcagcagttgcaggtaacaataggcacggtaggttagtgcctgcgcataaatatatttgaatttatgactaccttcggggtcgacataatttataatagcgttggcattactgattactttgtagtaataatgccacatatactccgtgtaactactggtaggtatggcatgagaagccccgttgaatatcgtatagaaattgttgcggggacaatacatgtcagccccctgatactcggcatacatcagtttgacagatccttcaccgttgaatgacacgccatcgagtttattagtggggtaagtggttttcatcaacttctccaatccgctgacagcataggcagcgtacgcttcatccttgaataaatcggcaggagatacctgattggtaggggcggtatccagatagtcgctggcgcaggagtaacacaacagcgtcaggagcaggcagaatcctatggagtgattcaggaatttcatgtgtatggcttttttcttcataaggctataagttaatgttgactccgaacgagaaaacacgggcgatactcgtataattgttgacgattccgtcaaaagtctgtaccgggttcagccctttgcgtttgctgaacagggcgacattctctatggcagcatgcaaacggatgccgccgagtgtcaatcgtttgctccatgtggcgggcaggcgataggagagggtgatgttcttgatgcttagatagtcaccgcttacaatatagcgtgtagatgctttctggctgttatatccattgatcgttgcatccagattcacttgcggaatacccgatggatcgagacggttgggcgatgtgggcgtcatgccttcggggattgctgtccatgcattcagtaaatcgggagtcaatgaatgtacgcctaccgatgtcagagtctgataaggctggtcgaagactttggaaccgcaactgaaaatcatcagggcggacagagtcaggtctttccagcggagagaggtggtgaccgagccgtttatcttcggtaatgaactgcccgaccagtctttgcgtgcatatctcgggtcgcctgtataatattgtccgttgatgtctacccaactgtctgtcggaatcggatttttaccttcggtgctctcttctccgtttacgggtgtttttccatcctctccggcaatgtaataagcgttgaagtccggcagatatacactgcgacctgtcatctggtctacgccagcatactggtacagccagaattcataaatgctgtgtccctctttgaacttctggaaatctccgttcgtaattccctcttcccgatctttatccggcagttttccgatcttgtttttcactttggaaaggttcaaacctacattccattcccattcccggttgcggatgatatccccgtcggcagagaattcccatcctttattggaaacgtctccaatgtttcgccagacggtggaaaggcctgtcgatgagtcagtggcaccggcagatagtggttggataaacttgaacagcaagtcgtccgaatgcttgttatagtattcgaaacttaggttcacacggttgaaaagacgagtttccagaccgatattcagcgaagaattcgtttcccattttagttccgggttttcgttctgcactttgtagtaagcggcttctccaccgttgacggcagagccgtagagagacatccactggtacaggccattactgcttccgaagttatcgtttcccacttgcccgtaagaaacccgtaacttgaggcggttcagccacgacacgtttttcaggaacgcttcgttggaaagcatccagccgatacctacgctccaaaagttaccccagcgatggtctgtatggaagatggaggaaccgtcgcgccggaaagaagcttcggcaaaataagtttcgttgtagtcataccgggcccgtgtgaagtgaccctctgtacgataggtgtctttatatccctcactgtaagttgtggtggtgaaatttgaaagttcgtctattccgggaaagctctcattctttttctgtatggcgtcgaaattaagcttgtaatcatagttctcgtgccccaccatccattctacgaaatgcctgccgaactggtgtttccatgccagtagctgttgcagggtgtattccttatattcctgatcgatcttgctgataaaaccagtgtccttgtaagcgcctatttccgcatttccgtattggctgtcctcgatattgcgcaggctgatattgcctttcaatgagaatgtaaaatcgcgtaggaaagaaacgtccacataggcatttccttgcaaggtattggcagcgttccacaacttgttcttttcgctttcccacagtagatggcgtccattgctggcggcatccgattccgaacggctttccgaaccgtcatcatattgttttccgccttcttcgttcaggatataatctcctttggaatgaagcaatgagccgtcgctggcaaatacatcctctgtatagtggaggtgcaccggatagataggtgctattctccgtgcaaagtaaaatgcattcgacaggttattggattgcgcacttccggcggctcctatatcccagttcgttttctggtgagtgcctccgagcgacaagcccgtttttagccatgggcgtggggtgaagtcagcgttgagtgagccgctaagacgattgaaatcacttttcctggtatatccgtcttcattaagatagcctagcgagaaacggatccggttcttttcattgccggattctccgcttaggttgtattcctggcggtgaccgttacgtgtgtagggagaataccagtcgagatcgtccttatatccgtccagtatccgggcgtcggatgccagatgaccgtttgcatcgaaaagggcattatcggctttgttatagatgttgattcctactttgctgataatgtcattgttggtggcgatggtcgcttcttcgggactactgccgttgctgataagctggttgcgatacccctgccacatcgtttccatgaattgattggcattcatacgttcgtaatcaccctgtccacgcgcgctgaagccgtggcgaatgtccagttgaagagaaactccctgtttcttcgcctttttggtggtaattaaaatcacaccattcgaagcccggctaccgtacaatgcgcatgaagcagcatctttcagtacgctgacgctttctatgtctgccggattaagatcggtgatccatcccgtatagggcataccgtctaccacgtaaagcggcttattgcttccgttcaccgaactgtatccccggatccggacttccgcttcgataccaggctgccccactccgtcaattgtctgtagccccggtactgctccgttgagcacggagataacagaactgaccggacgcatttcgatttgcttactgtccactacggaaacagccccggtaattgatcttttgaggacagtgccatacgctacctgcactactacttcatccagttcgttcacgttcggacgcaaccggatttccatcatattatgccgggcaggcacttcgatagtttggtatcctatgtaagaaataaccagcatttgctgtccggggagggttggttgaagactaaactttccatccagatctgaaatacagccttgccgactgcctttcactgtgacagaagcacctgtcaatggttcccggctttcctcatcaatgatgattcctgttatattttttatttgggcataagttaggttaatggatagaagcatgtaaatgcatatcactcctatctttattaaagtatcttctgtccgtcttttaataattgtcataagttgtatatcttgacgtatttgttgattttgcttgctatttaaacatttacaaaactaatatattataattagtgttataatacattgcctcctatttatgcaattttaacggtgtagactgctaattattagctgaattggcaaattagatactttttcttgttctatattttatattatttgttcttgcggctcgagagatagaggcttctttctttttttcattgcattaagtagaaatctctcccaaaacgtattatagttcgttaaaaaagtatacattgcacggattctggacatttttggtggataattggaacaaaattgcaaggtaaacccgttttcttttgctatttttgcatcgtgtacgtaaacgaagtgcacgtagaatagagaacttattcaataactataaataaataaggtatgaaaacgaactatgaaattcgctatgctgcgcatccggaagatgcaaaaagttatgatacaacaagaattcgcagagatttcttaatcgaaaagatatttgtccccaatgaagtaaatatggtatattccatgtacgaccgtatggtggtaggtggtgcgcttccggtaggagaggtgctgacgctcgaagcgattgatccgctgaaagctccgttcttcctcacccgtcgcgaaatgggtatctacaatgttggcggtcccggtattgtgaaagcaggcgacgcagagttcgaactggactataaagaagctctttatctgggttcgggcgaccgcgtagtgactttcgaaagcaaagacgctactcatcctgctaaattctacttcaactcactgactgcacatcgcaattatcccgaccgtaaggtgacgaaagccgatgccgtagtagctgaaatgggttctttggaaggttccaatcaccgcaacatcaataagatgctggtgaatcaggtgttgcctacctgccagttgcagatgggtatgacggaactcgctccgggaagtgtgtggaacacgatgccggcacacgtacacagccgtcgtatggaagcctacttctatttcgaaattcccgaagatcatgctatctgccacttcatgggtgaggtaggcgagacgcgtcacgtatggatgaaaggcgatcaggccgttctttcacccgaatggtcaatccactcggctgctgctacccacaactatacctttatctggggaatgggtggcgagaacctcgactacggcgatcaggacttctcgttgattacagatttgaaataacaactacaatagttttcctaatttaataacaaaaagaattatgaatcagtttttgaatttttctttggaaggtaaagtagctctcgttacaggtgcttcttatggtatcggatttgctattgcttctgcatttgcagaacaaggcgctaaagtttgttttaacgacatcaatcaagagttggtagacaaaggtatggctgcttatgctgcaaaaggtatcaaagctcacggttatgtatgcgacgtgacagacgaaccggctgttcaggcgatggttgctacgattgcaaaagaagtaggtacaattgatatccttgtaaataacgcaggtattatccgtcgtgttcctatgcacgagatggatgctgctgatttccgtcgtgtaattgacatcgacttgaatgctccattcatcgttgctaaggctgttttgccggctatgatggaaaaacgtgcaggtaagatcatcaacatctgttctatgatgtctgaattgggtcgtgaaactgtatctgcttacgctgccgctaagggtggtttgaagatgctgactcgcaatatctgttctgaatatggtgaatacaacatccagtgtaatggtatcggcccgggttacatcgctactccgcaaactgctcctcttcgtgagccgcaggcagacggaagccgtcacccattcgattcattcatctgcgctaagactcctgccggtcgttggttggatccggaagaactgacaggtcctgccgtgttccttgcttctgaagcttctaacgctgttaacggtcacattctctacgtagatggtggtattcttgcttatatcggaaaacaaccgaaataatagctgatagaagaaattccggtaaggtgatagaatggcaaagagcatcctcttttcatctgtcaccttattttttattattccctttgcaggagctatatggccgatttattggacatatatgcccaacgtgttgaacatatagctccaacacgttggatatatatagctgacgcgttggagctatacatccaacatgccggatataatagcctctgatttgcaaagtatatgttattcattcaatgtagactaattatgagaaagatattaattctgtttgttgtagccttgattggttttgcttcttgtgccgacagcaagcagtcaatgacagtcacagtgaccaattctttggctcttgaacgggcaggggagatggttgaagtgccgatgagcgatgtggtcgctaaattgaaactggcggatacggcacagattgtggtgcttgacgtcgacggtcagcaagtgccttatcaggtgacgtatgatgagaaggtggtcttccccgttacggtagggggaaacagtgtggttacttataccattcaaccgggcacaccggcaccttttgatgtcattgcttgcggtaaatactaccccgaacgtctggacgacgtagcctgggagaatgatcttggcggattccgtgcttatggtcctgctttgcaggctcgtggagaacgtggttttggctatgatctttttacgaagtataatactacggagccgattttggaatctctgtatgctgaagagcttaatcctgaaaagcgtgccaagatagccgaactgaaaaagacagatccgaaagccgcttccgaattgcagaatgccatctcttaccatatcgatcatggatacggtatggattgctatgccgtaggtcctacgttgggcgccggcgttgccgctttgatggcaggtgacactattatctatccttactgctatcgcacacaggaaatccttgataatggtccgctgcgtttcacggtgaagctggagtttaatccgctggtggtccgtggagactctaacgtggtggaaacacgcgtcatctccttggatgcaggttcttatctaaataaaacagttgtttcatataccaatttgaaagaagcaatgccggtaactacaggacttgtattgcgtgaaccggacggtgcggttgtggcagatgctgcaaatggctatatcacttacgtagatcctacaactgaccgtagcggtgcaaacggtaagatatttgtgggtgctgcattccctgcacaggtaaaagaggcgaaagtggttcttctttccgaaaaggaaaagaaagatcgtggtggagccgacggtcatgtgctggctatcagcgaatatgagcctggttctgaatatacttattactggggatctgcctgggataaggcggctatcaagactccggatgcctggaataaatatatgactgaatatgcgcagaaattgcgtactccgttggcggtggcatattaattaatgtgctgaattgcttatacagtcaaaaaagaaggattgtcgaggtgtgacgaaacgccctctttaatttcttttactcactgaatacgcgattcattattgaatatcatgcgtcttttctaatagatgaagcaaaggtttctttttatcaaaggaacctttgcttatttttatctttctgaaaaagaaagagaattaagaatgtgtctttctggaaaagaaagataatgtccttaagctatcttgtaaaagcgtgttgttcgtaatattcgtatgtcgttccgtcttctttctctttctcacgaagttcatagactaattcattctctgtcattgtggtcactgtccacacttctgtgtaattatcctcttcagtgtcgatgagagtcagcttattaccggagtagctccatgtaccgtgataataattagtacttccggaggagttgtagacatctttttctacatacgtaccatcttccttgaactctatggaataacggttggttccatttacaaaatcttctttagagtcacttaccttttcaccatcttcccattcttgtgaaagataatacactccattccatgttcctaacaataaatcgcgtgaaccgacagcgtcatcgtcgtcatcgccacaggaataaatgctgaacgacagtaatactgcaactatgcaaacggttgctttccagattgttttcataataaattgttttaattgtttgattttgagatgatttgtttttatgggattatttgataatcgtttccacatgtccattcttgaagaataggtagaacgagctggaatacatccattgcacttctccatttgattcttgaatagtctgcggtttgccgaaggccagcagacattcatcttccgtcatgcctttcaccggcttgttgatactgatttcattccagtgagtgattggtgaaagttggttcgttacgatgaagtcgaacattttattcaatacttgcgattccacctgtacgaagtcatccatgatttctttgtgagatgctttcttgtccggttgcagcttctccatgggagttatttttttcattatcactgctgatgattctatccgtatattggaaagatagtagaccagcttgccgtcttttacttgaaacagggctttgcaatagtaagtattcttctgatttgaatctgcttgcgaggcaagtatcagatcgcaactgaagtttttagccggtacgtttacctctgtgatcccttcccgtagctgcggacagacatttttgacggtccataacagtgcattagcgtagatgttctcgtcttgcatgctgctgaaaggggtaaatccgctgaccacatatttattgccgtctgcactgacgggatagctctttttctgttcggtgaaagtctgtgctatcagcgggataactcccgtcagcagatacatgattgccagaaattgtcgtttggtcatcatattccgttatttttaagaaaacagcatccacggccctttttgcgaagagaaaagatcgtggacgctgaataaataatatggtttattgaggtttggttgtccttagaaggcaatacccagacgaatcataaagttgctggtcttgaatccgtcagcatcgctgaatgtatctatgaatccgcgttgataggtgagatccaggttgaaacggtcgtaccaaactcctacaccgatattcataccggcatcgaaatgattgtagtccacttccatgtaatctgcgtaatctccccaactgatgctttctccgtctgctttcattttacttgtgtaatcgtagctggcaaagactcctacatgcgggtcgatatgaacattgtccgccactgcaaatttccatccgaatgtgaacggagagtattgtatattatgagccatgcactttgtgtcttccactttgaaaccacgggagccgagtccaaattccattccccagtatcctcctgtgctgcctaaagacttctggtagccaaatgttgcgttatatccgatgtttgagtcagctccttcggctccgtcaccggagaagttcatgatattcaaacctgcacgcaagaaccattgtgtgctgctggcttgcttctctgttttgacgattgcgcttctggatgatacgatttgcgcttgagttcctacgcacaataagagtgcggcaaccattgatagtacttttttcattgttatttatgttttagtgattaattcttattcttaacgacaggtgctatctggcttcttccatccgtgggtgatagcttctgcaggcgtatccattcataatcgtcctgggtggcaggatgccagttgacgaagatgccgggataacctactactgtaaccgtgtatccccctgttttttcattatcttccactttgaaagtggctcccatgatgacatcgcagttgtatttgatggtggacagatacgtcccccatgcacggatgttgtcaagttctcctttcatggcgatctccacttcctctttgcttagtgtccattcatccttgatccgtcccttatcttccagtattttcacctcgacaactgtgggtttgacacaaacttcagtaactgcatcgcctgcacgtgcctgtgcatcacgaaacttgaagaccgtcttttgcgcatgggctccgacggcacaaccgacaaccagagcaataatcagaaatagttttttcgttttcatgtccttttgtgattatatgttaatatgcctgcaaaggtatgcgaaaggagtatactaccgggtgaaagcatagttccaagaacgatacggaattgtatcctatttggatacactggggaagtttccggtattgatgctgtcggaaagatcgcggaagaaatcatggccgaggatgcaggagatgcgccagagcaggtggatgtcgatattctctttccggaatatcttgtaaacattggggcgtgtgcagcatagttgggtagcgaaccaggtgacggtgcgtccctgttcgtgaagcgtgcgttcaataagttgtcccgcatgaatcatgtgcctattctgcttatgtgtgtcccccagactcccgttgggcggacaattcaatctattgttgacaggaatatatagaaaaggcgtgggaatctctcaccttcgtccgttccgtgttcaaggccttcgcaatgccaactatcgggaacgaacaacgcagaaagcccacgccgatatgtacaacacccgtagcctccctttgttttccaaagtgaggcacggatgtatataaatacacatcaggaggacgtctttgttgctgttagtcattccgataggtcaaagtttgcgaagttctgaacacaaatgacaaacgcttgtaaacgtcttctcaatataaacgtctctccctcgccacccggaggctttctgcggaagagaccgttgcaaatgtataaaaaaatacggttggaaatggtaatgtgaatcagaaactttttgaatgcaggttgttttgccctctttttgcctttttttgccctttaccaggcgaaatacggttgcactggcatcttgtaagaaagaggagggatctttcaattttgggcacgaaacgggctttaaactacaaaagccggggcataatacctcggcttatattttttttcttatcagggagcttttttattcatcagaaaccttttctttcttatcaggaagctctgctcttttcgaagtttctgttttttcaaagattataacaccttgaattcataaccttcctctttcaggaactcgatggcacggggaagtgcgtattgcaggttaccgttgttccatgacttcagcgaatcgtggaaagtgatgatagaaccgtttcgcgcatagcgtttcacgttgttcagcacttgttccgggcgcatccgcttactgtaatcgcgggtcacgagatcccacataatgatgcggtaatgatagcgcaacgtataatactgcctgaatcccatgtgtccgtgtggtggacggaagagatcggaatgaataatatcatctacctttctggcatttgccaggtaatccggattggaatattcaaatccacggatgtggttgaaagtatggttaccgatgcggtgtccgtgctctaccaccatccggtattcatccgggtgtttgcgtatattgtcgcctaccatgaaaaaggtagctttaatatgatgcttttccagtatttccagtacccagggagttacttcggggatggggccgtcgtcgaaagtcagatagactgcccgctcattcgggtccatccggaagatagcttgtggatacaacgcccggaaaagccaaggtggttgttctataaacatgagagtctgtgttttgaagtattaggaaataagtattaagtattataccttacggaaaacatgccggaagctacgttaatacttaatacttattacttcatacctaaattatttccctttcattctcgtcacgtactcgttgtatagctgatcgagttgcgtagagtaatgttttgcgagttcttctgatttgtatttttccattaggcggacttcggcgtcaagcaaactggcgttgtacacgaagttttcgctggcaatggcaagctggttatcgttcaggctaagataccagatcatgtattcgagcgacttgttggcaagctcgtcgataatcttgttggctttctcgttctgtcccagttgataataagactctgccatttggaaggcgccatttgcccagtcatacggtacgttgattgccggaatcatcttttcggcgtaatcgagtgcagcgagtgccttgtccttcttaccttctttgataagctgtcctacgagctgcgtgaagatacggcggtgcgtgtagcacatacgcatcacgttctcgtcgatgtagatacccggcttgtcgataccgccgaacttgaacttgttcatcaggttgtcgtacatcttttcactgtcgatcttgctgtccagtttgtccgtatcgaacggagtgaagcggtaggcgagaccctcctgtgtgaagtggttgcccatgcccagatggttttcgcttcctacggtgattgccatatagataggacgttcccagttagcgttggcaagcatttcgagcatcatcagctcactcttgtagagggcgcgtttcgggttgccgttggcgtctctaagggtgattgtcatgtattcggggatagagtcgcccagagcttccggtattttcatgccggagcggcgtacggcttccttatctatcttcatgacgatgctgtccgtagggatgagcggaagttgtatctcttttcctgtcttcttgagaagttctttcaattggtcgttcttgccaagcatccagcggttgatgatttccttcagttcataaggattctcaccgaagatggagtgaacgagcgacaatatggtagtgtctccctgtgcagccagttcgtttgcctgtttgaaatagctgtcgataagagctttcatttccggacggatagagatatattcgttttgtccttccacgtattccacacggtcccaagtgatagggagtgacggagaatcgtaggccggacgtttcatctggtctatataccagtctgtttgcaggtaacttaagttacaggtgcgggcatccgtacggaaaccttccgtttcctgattgtaccacaatgggaaggtatcgttatcaccattggtgtagataatcgggttgccttcttcctgcaaagtcatcaggtagttctgtccgaagtcgcgggcaacgaagcgtccgctgcggtcgtggtcatcccatgtctgtcccgccatctggatggggacgaacaaacagagcactgaagccagaacggctgccggaagttcctgcatcttggcataatctcgcaacatgcggatgatacctgccactcccatacctacccagatggcaaaggcatagaacgaaccggcatacgcatagtctcgttcacggggttgtgcaggagtttggttgaggtagagcacgatagcgatacctgtcataaagaacaggaagaataccacccagaattgctggataccccgctggctatggtaagcctgccagaagagtccgattaagccgagaatcagcggcagacagtagaatacgttgtgtcctttattgtttttgagatcttgcggaagcaattcctggttacctaccagtaggttgtcgataaacggaataccggtgatccagttgccgtgctcaatttctccgctaccctgtatgtcattctgccgtccggcaaagttccacatgaagtaacgccagtacatgaagtttagctggtaggagaagaagaatttgatattttcccattgggtaggcatgtttaccatcaccatctctccacactggtcgtaaggaacgtcatatcccttgatgtctacccattgtttgtagagcggtgcgtgtgacgaactgtacatacgcgggaaaagcatattctgtgcatattcgtattccacacgtccgggaagttcgatataagagtctttttcgtcgggcgaagtcttttccttgcggacaaacttacttcctgcttccgattggcgcggaatacaatagccgtcttttacgtcaagtgccactttcgaagagaaagcagggccgtagaagagcggacgggttccgtattgttcacggccgaggtattcgcccagggtgaatatatcctccggtgagttttgatccatcggagtgttggcagtagaacggataacgatcagtgcgtaagaagaatacccgattacgatcatcatggtgcacagtaatgctgtgttcatggtgcgggcggtgatacgccatctctctttgattttagcctgtacactcggagcaagataaagtcccagtgcggcaataaccaaaataccgatgatgatactgctggctccgtgtccgtagaacgggatacccagtagagcaatcgtcagaataaaggagatagccatgcgcgttttgttcttttcggtatagctttcgtatacgccccagatcagagccgctgcaagcagaatgatataaaccactacgcctgaattgaacgacattccgagtccgttgacaaacaacagctcgaaccagccgcctactttcacaatgcccggtacgatgccgtaaagcacggctgcaacgagtaccattgaaccgaataacgcaattagcgaacctttggcggtagcgtttggagttttcttgtagtagtataccagtacgatggcgggcagacaaagcaggttcagcaaatggacaccgatactcaatcccgtcagataggcgatgaggataatccagcggtcgctatgaggctggtcggccacgtcttcccatttcagaatcaaccagaaaacgacagcggtaaacagagaggagaaggcatatacttcaccttctacggccgagaaccagaatgtgtcactgaatgtataaaccagtgcaccgatcagtccgctacccatgaccgtgataagctgtcctttggtgatattgttttcgtcagtgataatcagtttgcgtaccagatgggtgatgctccagaaaaggaacaggatacaggcaccactcatcagggcactcatgtaattcaccattttcgcaacggttgttacgtcggaagcaaattgagtaaacaggttcgccatcagcatgaagaaaggtgcgccgggcgggtgtccgacttccagtttatagccggtggttatgaactccgggcaatcccagaaacttgcggtcggttctattgtcaggcagtagacggttgccgcaatgatgaatgtaagccaacccataaggttgtttacggttctgtactgtttcattagcactatcgtagtttattcgttaaaaacaaattatgaggtcgcaaagatagtgatttgtaaggataatgaggaagaaagtaagaaatattaagtaacaaaggggtgatttactatctctttcactcttccggaaggcagcagagagggaagatacattttaaaacaaggaagccgtatatctatatagagtctatggcaactttaatgatggtgatgatgttctcctaaaacccgatgaggcaatgtaccgtgtcccaatagctcgataggacagttgaagttcctttccagccattcggtagtaacgcctgtatccggatggtaatccagcgtttcgttgacgcaagcgatagattttacttgttgcaatacagtgccgatgtcgtgactgacaaggataatggcacattctttattgatttcagccaataactcataaaggcgtgcttcgaaacgcttgtcgatatacgtgctgggttcatcgagaatcaataccgcagggtcggagatgatggcacgtcccaacagggcacgttgcagctgcccgccgcttaattgcccgatagaacggtgttcgaatccttcaagccccatgcgggaaataatctgtttacctttctctttctgttcgggggtaaatcgtgaagtgagcgatttttgtatgcttaatccggataggatcacttcttccacggaaatagggaacttccggtctatactgttgtattgaggcagataacccaggaaagtagaagtggttttagtagatgctttttcaggagtatggaatataatttcccctccggttggcttcaacagaccgaggatgcactttataagcgtcgttttgccgcctccgttcggacctataatacctagaaaatcccgttcgtagatgcttagattaacatcgtggagaacagtgcgaccgtcatatccggcggaaagattctttatttcgattattggtttcatcgttggaaatggcttgatgggttctttctttatacgtttattttgttgcagcctgtggcgcgagggctttggctacattcagcatttcttcttcccagtcgtaacttagcggattgatagggatcactttcgttccggtttgctgcgcgatggtttccgcattgcgtttgtcaaattccggttgaacaaagattacacgtacatcttctgcctgacacaggtctatcaaggctttcagatgggcgggagaaggttctttgcccccttcttcgatggaaatctgatgcaatccgtagtcgcgggcgaagtaggagagagccggatgataaatcatgaaggctttggctgcttcgggagcggagagttgacggcgaatcaggctgtcggtgtgctggatacgctggcagagcgaatcgtagcggtttctatagtatacctcatttgccttatccagttggctaagggctttgtaggtgtttcctgcaatgattaaagcattaccggtagaattccatacgtgcggctctacggcgtggatatgcccgtcgttactgttatgtccgtgggcatggtcgtggtcatcattgttgagtatgaggtcgattcctttggaggtgtcgaacacttggatatggggggtattgttcatcaaacgatccatccaggtctgttcgaagccgatgtatccgatgcggaaataggctttgctgtctcccagagacacaagttgttgggggacaggatcataggtttccgggctggaaccttttgggaccatgctgactactttaaatttatctccggcaatagcttccgtgaaataacgttgcggttccagggtgacggtaatcaccggttttgcttcgtcatcgttgcttgcttgggaagagcgtcctgtgcaggctgccattaggaggcaggcactaaggaggaaaagggttctcatatcttttagttgttttttcatgacttcttctatttcggggtttctttcttatcttgtttctattcttattttcgggcccgtaatatttcccgtttaccacccggaggtccgggcaggcgttctactgtgaatccggctgtctgtaacatccggcggacgacacctttggcgcagtaagtggtcaggatgccgtctctatctaataaaacgtagaggcggttgaatagttcttgcgaccacatttccggttgcttttccggtgcaaaggcatcgaagtaaatgaggttaaatgaaagattcagggcaggtgattcggcgttggttacgctatcattgatattgctcattgttcgttctctgttctcaacccatttgtttacgtctgtctctactttccgtagggtgaagtgtggagtgagttgcacgtctttctcccaaggtgatgtatgaagttgcttaaacaattcgatagccggttgctgccgggcggtcgtcgttaattgctcatcattggagatatatcctaattgctctatcgtctgccattccagtggatagagttccaatcctgtatagagtatattccgtctgcttctttctgcttcttcaagggtgagccaggcgtttagccctgtcccgaagccgatctcaagaatacgcggagtagtggcggaagaggctttaagtcccatatcgatgaaaatatgttgagactccgtgcgtgcccctttcgttgaatgataatgttcattcaattccggaacaaacagggtagcgctcccgtcgtcggttttctcaataatcctttccatcatacaatctctaatgcttactgtctaacgtctaatactttttacctgatatttaaaatccttaccctgctatagcgtcccaggcactttcgagtgcatacaggagaagaatataacgtatcagtttgccgacaaacatggaaactatggtgagccatgtgttgcttcgcataaatcccagtgcaatggctatcacttccccaatagcgggaagaaaggtgaagaaggccatcaatgctccttttccttgcaggaatttcaccattttgtctactttctctttctttaccttgaaatatttctcgatccaactgattttgcccagacgtcccatgtagtagcaagtcattccgcctactgtgttgcccagagtggcggagatcagacaggctatcgggggcagaccgagtttcaccagtgccaccagtaccagttcggaactgaaaggcacgatgctcccagccagtaaagccgagatgaataatcccgggagtccccattctatgaggagttgtatcgttgaatctataaaagcgtccatatattaaaagcgaataagaggatgagaccgaccaatgaaatgatgaaaaacacattcgaacttttactattggtcagtacaaagaaatgtccgatcaggatgctgttgcttatgataagcaaaggcaatagggcactgcaatatatcggttgcagggcaatcagcaggaacaggaaaatcgtcaggtctatcaggaattggagataggcgcgtgtgcgtatcttatcctcaaatccggcggcgatgcaatggacggcactgacgatgaacatcaccaacagatagccgagtattgccagttcccaaggctggaggatttgcaggttgaagaattccccgatagttagtagctgattgaaagggcgatagaacaactccatctcgttgtagaagaaggcgtgtccgaacagcatccagtatggcagcatccatccgagcagcgcaccgcagaaactacgcggagtgagcgactggaaacggtaggcttcgagcaaccaaagcaccgagaggatggtgaactgtgggaacagaatacttcccgctccgataaagaagaaggagtagaataaataacccgcagcttgagtttgctgatagcttttaaacagaaaataaatggaaatgagaaagcccagggcaacaatatctcctgtatataggtaatgcattttcgggcagacggtgaccagcaggaaatagatagctgtctgcatggaagccctcatacggataatgctgaactgattgttcagctctatcagaaagtaaccgatggttgcataaatcaggaagctgacaatccggtctgcccaccccggaagcagaaaatcgcgggcgggttgccaggcagaagggctgccttcgagtacggttgaggctatggaaccgggaaataaaaagtaagtcaacacccagcacagggcgcagataaagataacggcaggcagggtccaccgtcctgccgtcacttgactttgtagtcttttatttctcatgagtttattacttgttatctcttgatactataggtacattcggttgatattccggatattaatatcctgcatgcttgatgttaacaaccatcctgtcagctgttaatacctgattcctcaagtattaacaattgtcgtctaaactattaatacttgataactcaactattaatgcttgacaagtcatggtgttcaacgctatgcggaatagggctacttgcgtgcgaaacttgaattacaaatcgaatccgatatcgcggcggaaatacttcttgtcgaagtcgatcatgtctgccactttgtagctctgtgccagtgcctcttctttcgttgcaccgtaagagcaaacggcaatcacacgtcctccgttcgtcactacttgtccgtctttcatggctgttccggcatggaaaatgatgctgtcggtagcggcagcctgttccagtccgctgatagggaatcctttttcgtaggcttcgggataaccgccgctgacaaggatgacacagccggctgaacgtgggtccatcaccagtgttttttcgttcaggttgcctgcggcagtaccttcaagcagttctacgaagtcgctctggatacggagcatcacgctttctgtttccgggtcgcccatgcggacgttgtattcgatcaccatcggttcacctttcaccttgataagaccgaggaagatgaagcctttgtaagtgatgttttcttctttcaggccgttgatggtcggttcgatgatgcgtgtgcgtactttctccataaatacttcatcggcaaacggaacgggggttacgctacccataccgcctgtatttagtcctttatcgccttcaccgatgcgtttgtagtctttggctacggggaggactttatagtgttctccgtctgtcagtacgaatacagagcactcgataccgcttaggaactcttcgattacaacggttgccgatgcagagccgaacatgccacccagcatttctttcagttctactttagcttcgtccagtgtagggaggataagtactccttttccggcacaaagaccatcagccttcaatacgtatggagcttccagcgtttcgaggaaagcgagaccttcttcgaggtttgcggaagtgatgcttttgtagcgggctgtcgggatgttgtggcgcatcatgaagcctttggcaaactccttgcttccttccagttctgctccttgagccgaaggaccgataacggcaatatgctttagctccggacggttctggaagtagtcgtaaattccttctaccaacggatcttcggggcctactactaccatttgaatgttctctttcagagcgaaagcgctgatggcttcaaaatcggttgctttgatgttgacattctcgcctacggcagttgttccggcatttcccggagcaatgtacagtttttcaactttcggactttgggcaattttccatgccagtgcatgttcgcggccgcccgagccaagtaataatatcttcatctttgtgctattataagttatactgttatatatgattcgtatagatgcggtggacttcacaggttttataagttctgctcaaagtaccgggtgattttctcgtgcagatgtacacggtcgcggcctgctacgttgtgcttgtggcacgggtagataaacaggtcgggataagtgcgggcatctacacaggctttcatgaacgacagggtgtgttgtggcacgcaggtgtcgtcgtggtcgtcgtgaataatcaataggtgacctttcagttggtcggcaaggtttttcagattacattctttgtagccttccggattgctttccggtgtgtccatatagcgttcgccgtacattatttcatagtaaccccagtcgattaccggacctccggcaacgcctactttgaatatctccgggtaacggagcatcagggcggtagtcatgtgacctccaaaactccatccgtgtacgccgatgcgctcgctgtctacgtaggggagggatttcaggaattcaacgccttttacctggtctttgccttcttcgatgccgagacggcggaaggtggcattttcaaatgttagtccgcggttgctgctaccgcgattgtcgatggtgaacatgatatagcctttgcttgccatgtatgtgtcccatccgcgtgcgccgttctgccatcctccggtgacgcattgcgcgtgagggcctccgtagacatatacgattacgggatatttcttagccggatcgaagtttgccggcttcatcaggcggtaatgcaggtcggtagtgccgtctgccgctttgattgttccggtttcgatgcttggcatctggtatccgtcgtaaggattttcggctgtcagcaagttggctgtttctttgaagtttttggtgtctaccaggttgatgacgcggggttggtctttggtggaataacggtcgataaggtatgtgccagaggcgctaagtgttccgctatgttcgctttccttgcagttctcaaacggctggcttatctttccattacttacgtttactgcaaaatggccgcttctcaagccttctacggcagtgaagatgacctctttacgctttgtgttgaatcctaggatttcgctgaccagccagttgcctttggttagctgttttactttaccggcctggaaataactaccgccgttggcactattataggtttcacctttcatgtttgctgcatttgtctcaaagagataaaggtgattgtagccgtcacgctgactttgatagatgaacttggtagggtcccacggcaaaaatacgatggggttttgcggttcaacgtatttagggtgcatttcttcatagagaactcccatgggttctcctgtctctgcgttgtactggcagagtttggcatgattctggtcgcggtttacttcgatcaggtagaggctcttttcatccggtgcccagctgatgttagtgaaataacggtctgtcggatcgcctgcattcagataaatgcttttaccggtagcagggttgtaaatgcctacttttacctgatggctcgtcattcctgccatcggatagcgtacgttatttacttcgcctacacgtgcagtgatgtctacaagcgggtattgtgtcaccatgctttcatccatacggtagaaagcgagcaggttgcctttcggactccagaaagttcctttgttgataccgaattcattgcggtgcactgtttgtccgcaaacgatgccttcgggttcattggttactgctttctcattcacatatagattgttatctatcgtgtaagccacatttccactggctgcgcaatagtcttcattatttgccccgtcctttggtttgaaagtgctgataacctgattgttcttgaaatcatatacaatgaactttcctgctatcgtgaatagcatttgtgccttgtctgtccatggaaaacggacggaatacaggtgtgataattttcctgccttgttttcttcaagcactttgttgatttgctcgcgagtgataaccattgtttctttcccggttttgggttgaattgaataaagggtatctactcctggcttgatacattcgtcgccccaccattgcagcccgtacaggttttctgcatagcggtaactctcgccgcccggaatcagttcttccagcgtcggttttttggtttcttgtgccataacattgaatccgattggtagtgccaacaataacagaatggctctttttccaattttactcattgctcttttctttattatttgtttttaaatccttctatttttactctgtccaaaggagtctgtcttgattggataattgcacttattttagcaaaggcattaaataggtcgtcaaattgtttttcgtaactttccctatcagaagtaatatcttcttcgagatattcgatgcgttgttttaattcttccaactcctttttaggtatattggatagaagatattggcgcatacgtacaaaagcacggataatattgatatttacttccacagcggtcttggacttgaggacgctggataacataactataccatattcagtaaatgcaaacggaagatatttgatgttatatccttgtcctgttttcaaggtcgcaatttgcgaccttgaaattgcaacttcttcttttgttagctcgaacatgaattcagcaggaaagcgttcaatattacgacgtacttgttccttgaggcgtttagtttcaactccatacatttctgccaaatcaaagtcaagcataactttttgccctctgatttcgtatattttgttttctataatagctatatcatccatttttttgtttagacaggttccaatttgtgactgaacattagaactatgatgtaaacttgaagttccaatttggaacttcaagtttttaattaattattaactagtgaattacagggtgaataagttgttgggattataaccgtttattcctcttccttcttcggaatcctcggctcccggtttcccctaaattctcttggccctcttgaatctcttcctccgcggaattctccccgtggttttctatctctttcatcgccacctttgaagtcgccaccttctctgcgtggcttgtattctccctctctgcgaggtctggattcgccgtcccgacgcggcttgaactcaccttcgcggcgtggcttaaattcttttctttctctgaatcttggagcttgttctccttcaccctctttcttctcttcgccctcttcctggctcttgaactctttatattttccgtcaaaaatctcatatttgcggaattcacactccaacggtccattgaacaaaggaaccttctggcttgccttcaagccaatctggtcgaaacactcttcccgataagaaagcacccatgcttcgtttcctacaaatgcatgtttcagacgttcgccgatcatctggtaaagaccgagcaaatcattcgtagagatacgttccccataaggaggattggtgatgatgattgatttctctttcggctgttcgaactgctggaacggttgcaattttagcacgatatctttcgatacaccggcagcttttatattgtgagttgcaatctcattcgctttcggattgttgtcatacccataaatcttatgagtaaactcacgctcctgactgtcgtcattgtaaatctcatcaaacatatccgcatcgaaatccacccatttctcgaaagcaaaccctttacggaatactcccggagcgatattcttagcaatcagtgcggcttctacagggatagtacccgaaccacacatcggatcgatcagatcacattctccacgccatccggtcattaaaatcatgccggcagccaatacctcattcaacggagcttctaccgcttcctggcgataaccgcgacggtgaagtgattctccggacgagtccaacgacaaggtacaggtagtctgtgcaatatgaatgttcagaagtacatccgggttgttgatgcgtaccgacggacgtttacccgttttctcgcggaagtagtccacaatcgcatctttcaccttgtacgaaacgaatttcgaatggcggaactcctcactgaatactactgcatcgatagcaaatgttttgttcacatcgagatattcttcccatggaatagcctgtatttgattgtaaacctcgtcagcatctttggccgtaaagttcttgatgggtttcaggatacggatggcggtacgtagacagaaattagccttgtacatcatacgtttatctcctgtaaatgaaaccatacgacgtcctatttgaatgtcgttggctcctaatgctgtcagttcttctgcaagtatctcttccagtccctggaaagtcttggctatcatctcgaattgttcgctcatatagattcttttgattttatttttttgctttagtttgtacgattcttgctcctgcgggcacgttttccgttacccagatattaccgcctacggttgcatcacgcccgatggtgattcttcccagaatagtggcgttggaataaacaattacattgtcttccaggatcggatggcgggggattcccttgataggttttccgtcggcatccagcgggaaactcttggctcccagcgtgacaccctgatatagtttgacgttgtttccgatgatactcgtggcgccgattacgacacccgtaccatggtcgatggtgaagtgagtgccaatctttgcggccggatggatatcaattcccgtttcgctatgcgccatctccgtgatgatacggggaatcagaggaacacccagttccagcaattcatgcgcgatacggtaattgctgatcgctttaatggccggataacagaatatgacctctccatagctttcggcagccgggtcaccgttgtaggcggcttccacatccgttgccagtatcctcctcatggcgggtaacttactgatgaatttagcagcaagacgtgcagcttcttctcgtttggagtcggagcagacgttgcatttcccctctatggaagtgctaaaacataatccggccaagatttgctcacaaagtaaatcaaacaatttttcaatgtttacaccgatgtgataattgatagtccggctgttaatagtagaatttccgtaatatccggggaaaagaatggagcgtgaaagctcaataatttcatacaagacttttgcagagggcagtggttcgccatctttgtgctgatgaaacagtcctttataagattcgctttccgatagctcatcgactgcctgtgtcaaaatgtgggtgaagttcagtggactcattaggtcagttgctcatatttatatgggcacaaaggtattaaaaaaataataaaattcgctgggattcaggataaataatgtatttttgtcacattcaaaacatgacatgaataaggggactgatgaatcagaagactgctatgaaactatttggactgttggggctgttgatgttgttgagttgcggatatgctgatagacaccgcaatagctcttcatgcgaacaggcgttggttgattctctggaagttcgtgtacaggattctttgttttccaatgtgcattattcccgctcacaactgcttgaggcactgacgcagacacaagattccctggtttattatcgtctgctcgccctttacgggaaaacattttttgtctcttccgattttgattctatactctattacaaccgccgggtaaaagaattttcccgcaatgcttcccaatcttctgaatctctccagtctccacgatggaatgatgtattgtccgatgtctataatatcgaaggcaacgtatggatgcaactgaaccgccctgattctgcaattatcgactataagaaagcctatggatatcgcctgaaaggaaaaaaactacacctgcttccggatatttgtatcaatatagctgatgcctatctgcatcgcagtgacttggcgcacactgcttcgtattaccggcgcgccctgtttctctgtgattctttgaacttgtccgagcacacgaaatttcctgtctactacggattggggcagacttacatggaactgcgcgatttcgatttatccaatcattactatgaattggccgggcagttcttcgatgaaatgaacgtgagcgagcaatggacctatctcaacaatcgcggcaaccattattattaccggaaaaactatcaggaggctttgaaatatatgcgcagggccaatgcactcgtatcttcttatccgcagatggtgtttgaacagaactttatcaaagtaaacctgggagaattgtacttgctgactgacaaactggactccgcacagatctgcctggacgaaagttatcgtttcttctccgatatacagcataactcggctgttcattacattgaaacccagatgattgaactggcattgaagaaaggtaatatagcccaagcgaagactatgatcgcccggactgctcctgtggggcatcttgacgccaatatgttgactatacgcaatcagtatctgcaacattattttgagcataccggtgattaccgccgtgcctatgaatacctgaaacgtgattgccatctggacgattccatccggagcgaacggatacagatgcgtgttgccgaattggatatgcgttatcggcaggatacgatagtgcttcgtaaggaaatgaagattcagcgacaggcggcagagatgagagtgctcaagttgagcgtatctatctgggtacttgtctgcgtgttgcttgtggcaggggtagtgatagttgtctggtatatgcgtaaaaagagggagtttcttcgccagcgtttcttccagcaaatcaaccgtgtccgcatggagaatttgagaagccggatttctcctcattttacttttaatgtactgggacgtgagatcaatcagtttaacggctcggaagaggtgaaacataatctgatggaactggtgaaatatctccgtcgtagcctcgaacttaccgagaaattgagcgtatctttgcaagacgaactggatttcgtccgtacatacatcgaactggaacgtggacgtgtcggagaagattttgtcgcaacaatcacggtggaggacggtttagatgcaacccgcatcatgattccatctatgattgtgcaaattccggtggagaatgctattaaacatggactggcgggaaaggacggaaaaaaggagctaatggtatatgtttcccgtgaaacaaatgggattcgcataacggttaccgacaacggacgcgggtatctcccgcaggtagtttccgccacacggggtactggtacaggattgaaagtgttgtatcagaccattcaattactgaatacaaagaacaagagtgataaaatacgttttaatataaccaacagaagcgatggacaaaccggtacggaagtgtcggtatatatcccgtttcgtttttcttatgatttatgatggagacagaagaaaagtataaggtagtcatcgttgacgatgaacgtacagcgattgatgctttgcgccgagagttggagccctatcgtgaatttgaagtaaaaggaatcgcagggaatggtgcaaaaggtaaaaagatgattatggagttgcatccggacttattgtttcttgatgtggaacttccggatacgttgggactcaatctattaagtgaaatcagggaggatattttgtgggatatgaaggttgtgttttacacctcttatgacaaatacttgcttcaggcgttgcgtgagtcggctttcgacttcctgctgaagccttttgaagcagaagacctgaaagtaattatggaccgttaccggaaggctatgagctctacttcgcttcctcttttgccttcttttgcttcttctattagtgcattgatgccccagcaaggcatgtttatgattagtacagtgacaggcttcaaactcttgcgactggaagaaatcggcttttttgaatatctgaaagacaaacgtcaatggcaggtggtcttgtttaatcaaacttgtctgaatttgaagcgaaatacaaaagcagaagatattatcagttattcacaagcttttgtacagattagccaatctgctattgtaaatgttaattatctggcaatgattgatggtaaatgctgtcaactttatccgccttttcacgataagaacgatttgattatttcccgaagttatctaaaagaactgcaagagcgtttctttgttttgtaatgtagacttcatattatgaaatacgccacttcttcagcagaagcggcgtatccttttgttagaatattagaatgagagagagtttatgttacatatttgtattatccatcgtaacggtcatttcgggtaccagtacgtaggcttgttttttagcgttccatttataataattcgtagtaacggtcttgccttcataagtgtaattgatgcgtaggtctttttcccatgcgtccttgctattgttccatttcaaggcctcgctttcaatcatacgtttgttgtcatcgtacttgtagttgtacttcatgtagttggcaagtgtatttccgtccattttgtaaacggtttgtcccactgtcatgccattctcttcgattggattataaatcaattgattatcgtagctacgtgcagaagtagcaagcgatacaacaagaagagctgcagataaaacgaacatttttaaagatacttttgctttcatggctatttaagtttttgggttatactttcatttgtctaccaaatacattggttttatgctgcaaatctacatattaatttggtatttgtgcattttagaagataaaagattgtcaaaatgtcaagagtggaggtgggtgataactagctttttgccaatattggtgacaaaaaaatatccggcagtcaatctgccggatatagaatgaatcacttcgtcgaaaaaggaatcttttttctagctttctggatacagagttaaataatgttattacccagacttgcctccattttgtaagcggaggtccctgataaggtggagtctccttgtgtaattagtgtctaaaagatagcaattccttattgaggtggcctttattcacttgatggtttaatgtgcctcaagccagtttttgccccatccgcaatctgctttcaaggggacgtgcatgcggtatgctttctccatttcttcgatgacgatttcttctacacgctctttttcattgacaggaacgctgaaatttaattcgtcatgtacttgcaggatcattttggcttgtattccttcggtctggaaccgttgatagatacgtgccattgctacttttataatatctgccgcacttccctggataggggcgttgatggcatttcgttccgcatatccgcgtacaacggcattccgcgaattgatgtccggtaagaagcgcttccgatggaagattgtttccacatagcctttttcctgggccacctgaatgcttttatccatatatgctttcactcccggataagtttcaaagtaaccgtcgattaactctttggcttctttacgatctacattcattcgttcggcaagaccaaatacggatatgccatagatgataccgaaattggcagtcttggctttacggcgcatgtcggaacctacgtctttcaggtcgatcttataaactttggcagcagtggccgcatgaatatcgtgattgctaaggaaagcatcaatcatattcttatcctcgctaaggtgtgccatgatgcgcaattcaatttgcgaatagtcggcagagaagaagaggcagccttcatcggggatgaaagccttgcggatttcttttccattctcgtcgcggatagggatattttgtaagttcggattgcttgaactaaggcgtcccgtagcggttacagtctggttgaaagaggtgtgcacccttcctgtacgtggattgataagctgagggagtgcgtcgatatacgtgcccaatagctttttcagtccgcgatgttccagaatcttttctactaccggatgtttgtgccggaggctttcgagcacttcttctgaggtgacgtactggccggtcttagtcttttttgccttctctacgattttcagtttgtcaaacagtacctcaccgacttgtttgggcgaagcgatattgaaagtctcaccggccaattcgtaaatctctttttcgatttgctccatctgggcggtgaaatgggcggacgactgcttcaatgcttccgtatccagcaataccccgttccgttctatattaaccaatacgggaactagcggcatttctatatcatagaacaaacgttctgcgtcattttctttcagttctttctccaatacatttttcagtttcagagttacgtctgcatcttcgcaggcatatagatatacatctttcgggtcgagatcgcgcatgttcttctgattctttcctttgggacctatcagttcgtcaatgtggatagtctgatagtgcaggtaaatttccgcaagataatccatgccatgacgaagttccggttgaagaacataatgagcgatcatcgtatcgaaaagtggaccttttactgttgcgccataattttgaagaacaatcatgtcgtacttgatattttgtccgacttttaacgaattctcattttcgaagaccggacggaactcatttacgatttttaacgcttcgccttggtccgatggtacgggaacataaaaagcttcattctctgcaatcgaaaagctcattccgactaattcggcatccattggttcggttccggtggtttccgtatctaacgagagaattttcgatgtaagtaacttttgaataatttcctgccttttctcctctgtatcaataagttgatagctataagtgagcgattctaacgtctctaggttcgatttttttgcttcacccggttcatcgggcgtgaaattcgcaaataaatcgccttgcattccgcctccttcttcgggaaaaagtggaagaggagagggggcactttttccagtagcaactttgcttccggtggcagaggttattccgtttccggaaatatcttttttgagcacccggtcgatgagtgttctaaattccaattcctcgaaaatgctgcggagtgaattctcgtctgcttcttcgcggacaagagcatccatctcaagttggatagggacatcaattttaatggtggcgagaaatttcgagaacgtaatcatttcccgattggtttccacttttgttttcaatgctcctttcagttggtcggtatgttccaataggttctcgatgcttccgaattcggagaccagtttttgagcagtcttttctcctactcccggacatccgggaatgttatctgaagagtcgcccatcagtccgagcatatcgatcacctgtgtcggagactgaatgtcaaacttggctttcacttcctccactcccatcacttcgaaacctcctgtgtgtttggggcgatacataaatactttgtcacttaccagctgcccgtaatctttgtcgggagtcatcatataggtagtgataccctggcgaccggcttcggtagcgagcgtacctatcacatcatcggcttcgtagcctgccacttccagaatggggatgcggtaggcgcgtataatatcctttataataggtacggaaagacgaattgcttctggagtttcttcgcgttgtgctttatattgttcaaaagcctcgtggcggaaggtgggacctgcggggtcgaaggctactcctatatgagtgggattctcttttttcaatacttcttcgagggtgttcacaaaacccagtatggctgaagtgttgaatcctttggaattgattcttgggttcttaataaaggcgtaatacgcccgatatatcaatgcataagcgtctaaaagaaataatttattacctgaatccatagatttaattaatttttcatggtaaaagtacaaaaaaatacggtattaagcgttttattattacttttgtgctcaaattgtgtaataaatggacagtatctcacttatcagaactccgattgaagcggaactgggcgacttcaaagaactttttgatagttctctctccagttcaaatgcattgctcgatagcgtcgtatctcacatacggcagaggaatggtaagatgatgcggcctattcttgttttactcgtggcacgtctttatggagctatatgtccttccactcttcatgcggctgtttcactggaactccttcatacggccagcctggtacatgatgacgtagtggatgaaagttccgaacgtcgtggacagctctcggtaaatgctatctttaataataaagtagcggtgctgacgggtgactatttattggcaaccagccttgtacacgccgaactgacaaacagtcatcgtattattcagcttgtgtccactcttggacaggatcttgctgacggtgagttgcttcagctttcaaatgtaagtaatcacagtttttccgaggaagtctattttgatgtaatccgcaagaaaactgctgctctttttgctgcctgcacaaaggctgccgctttctcggtaggtgtgggtgagggggaagctgaacttgcccgtttgctgggcgaatatattggtatctgtttccagataaaagatgatattttcgattactttgataataaggaaattggtaaacctacgggtaatgatatgcttgaaggtaaactgacattacccgctttgtatgtgctgaatacgacgaaaaacgaggaagcgcaagaaattgcaatcaaagtaaaggagggtacggctactctcgatgaaatagctcatttgatttcgtttattaaagaaaacggaggtattgaatatgcggttcagactatgaatgtctataagcaaaaagccttcaatctattggcttctttgccggattccgatatctgtgcagctctccgggcttatctggattatgtagtagaccgcgaaaaatagttacttccggtattttgccagaagtgaatagcacaataataaccggtcccaatcttctatcttttccgatttcatcgcttttcctaaaaggaaactcttgtctatttcttccgctgtatgaagatctaaagaacataatttggcggcttgctctatgtagtcccaggctttctctttggtgatgtgaccacatgcttgggaggcgcgcgccaggctcacaagcagtcccatatcccatccgataatgcctttttccaagtcatttatccatataataggatcccttctttcctctgtatatttcacaaatttgtatagattctttccttgacggataaagcgttccactccgaaaaaacgcttttgaatgatgttttcgaactcgttgatgttctctgtagagagtaaataggggagcataatctggtaggagactctgtcgccttcgttgataaggaactggaatagtccggtggcggactcattatcggtgcagtgaaactcctctgttagcagtttggatagcttttgcggatggattccggtctccatggagttgagatagaagccttgcagtccggcttccatataaccgatgcgtagtcccttctttttctctgctccgaggatgaggttcagagggttgtgattgaatcttaaggttcttgtatatgcgtccatcctaatacctccaaaggttcatgaaaagcgtgagaactgttgccatgtattttcctgaggcttcggcaagccgttatgagtatacaagcaacagtcccacgctccattcgatatataacaaaagtatatacatgaaggtgcgtgagacccgtttgcttattaccattcataactttgaattttgccgaattccaggaattggtaataaatgaaacgttctctaatataactaattagctatattttcatcgctaaaccttttacaaagataagtatttttctgaattctcctgtaactatctttagattttcttaaataaaaaataccgcgtcggttcccggagtacgggaatcgcgcggtaaggcgtatttgattgctaatgtagcctttagcttagaagaacttgatttcttcccctttgatgtcagaaagaaggaggttggctaagcggctggttcccaggcggaacagttgattatccagccattcttcacccaatagctcttttacaattgtgtagtaaataatcgcatcattaacggtattgatgccacccgccggtttgaatccaatcttgattccggtcttctggtagtattctttgatggcttcacacatcacataagcggcttccggagtagcggcaggctgttgcttgccggtggaagttttgatgaagtctgcgcccgagtacatggataggatagaggctttcttgatgttggaagcactctttagtgcaccagtttcgaggatcactttgaggtggcgttccttgcaaacttcctttaattcctgtatttcttcacacattccttcgtagtctccgcttaggaatttgccgatggaaatgacaatatctatttcatctgcaccttctgcgattgctaatgctgtttctgccacttttacttctataaatgtctgtgaagaggggaaacctcctgatacacaggctatattgactctgtctacctccagcgtattcttaacgatggctgcaaaattggggtatacacagattgctgcaacatttttcagatcaggatattcgtcgtcaaactgattgactttttcggtaaagtgcatcacacttttgtcactgtctgtactattcaaagtagtcagatcaatacagttgaacaggaacttcttaacatcttccgtgttgttttccggcacttttttctcaatcaattcagctacgcgagcttgaatatctgcatcgctcagattggtattatactttgccaatgcggcattgtacttgttgggctgtgagttattctcttccatgatctttcagttttgggttgttgatatgtcttttattatctcgtttcgttttcttatccatgcttttctggaaagcagtggttatgtctacacctgtctggttggcaatgcagagaagcacccataaaacgtctgctatctcttcatctatattatctttctctccctctttaaaggattgatctccatatttgcgggccatgacacgcgccagttctcctacttcttccgtcagaactgccatattggtcaactcgctgaagtagcggacgccgtatgttttcacccattggtccacttgtttctgtgcttcttccagagtcataattgttgatggttggttattattctttgttttttgtatccatgcatatagtaacgggaccgtcgtttaaaagttcaactttcatgtctgccccaaagatgcctgtgcctatttcttttcccaatgcaccgcttaaatctttgcagaattgttcgtagagtgggatagagacatccggcttggcagctttgatataggaggggcgatttcctttcttggtagaagcgtgtagcgtgaactggctgataaccagaatctcacctccatcttctaagatagatttgttcattacaccattctcatcatcgaagatacgtagatttacaatcttcttgcagagccagtcgatatcttcctgcccgtctgcttcttcaataccgactaatatcagcatccctttcccaatggacgacttacagtgtccttcaatggttactgacgcatggcttacccgttgtatgactattctcattgttatttattctatttcatgattaggaaaggcaaatttacaaaattcagaagagaaaacggtgtgttggtgggaaaatattgtgaattcgctccgtagtcaataggactattcgttattatttgttgtcaattcgctatcttggtagtgataatcaacttattgattgttatggtttgaaatttagagcggcactgctcgaactttcgaacagtgccgccttggctgacgtatttccttattgttgttcgttatctaaaccttcttttacagtcttggctttcgcttctccaatcacagcggaaatctcctcaaaagaggcttctttgatccgttttacgctcttaaattctttcagaagcgctgtttttgtcttttctccaatccctttgatattgtctaatgccgatgctacctgccgtttgctgcgtttatcacgatggaaactgatggcaaagcggtgcacctcatcctgaatctgtgtcagcaaacggaataacgggctttgctgtttgataccgatagtctgcggaggaaatccgaaaagcagttccgatgtgcgatggcgattgtcctttgccagtccggcaatcgggattgttaagttcagctcatcttcaatcacctctctaacgacctccatttggccttttccaccatcggtgataatcaggtcgggcagaggggtgttttcttcaatagcgcgctgataacgtcttctgacgacctctttcatggatgcatagtcgtcaggtcctacaaccgtctttatattgtatttccgataatccttctttgagggtttagcctttttaaagacaacgcaagcggccacggcatcagaaccctgtatgtttgagttgtcaaagcattcaatttgcaaaggcggtctgtccagatgcaactcttgctgtatctctttcattaatcgcatacttctttgctccggattcagcttttccgcctgttttagacggtcggctttgtattgcttcacgtttagaatcgaaagatccagcaatttctttttatctccccgctgtggaacggtaaatacgatgttgtttagctccaaatcaagttcaaaaggcactataatctctctggattgactcttatagcgttcccgcatttcgataatacccagtgtcaaaagctcttcttttgattcattcagcttctttttatattcgaatgtaaacgcctggttaatggcaccgtttgtaatatgcagatagttgatgaaagcggaattggactcgtcctcttcaatagaaaatacatctatgttgtgcaatacagcacttactacctccgatttggaacggtaattttctatcagaagatatttctctttcaccttctgtgcttcttcaaacttcatctcaccagctaatgtctgcatcctttccagtaacatacggctgatttcttgtgtatttccttttaggatctctttgatttcatcaatgtttttgagataatcctcctgtgattgtagcccgatgcatggtcctgcgcagttctttatatgatattccaggcatacgttaaacttaccagcccgtatattctccggagttaggtttaaactgcaagttcgcaaaggatataaatgctttatcagatccagtaccgcatacatggatggtatgtgactatacggtccataatacgaagaaccgttcctgataatcttccttgttctgaaaactctgggaaaatactcgttttgtacgcaaatagaagggtatgtcttgtcatcctttaatagaacgttgtagcgcggcttatatttctttatcagattattctccagcaataacgcatcttcttccgtgttgactacaatataacgaatatcggcgattttgctgaccagcactcgtgtctttcccggttcatgctctttgctgaagtaggagtagactcttttctttagatttttagcctttccaacgtatataattgtgccctccgtgttcaagtattggtaaatacccggtttctcgggaaggttggctacaatccctttcaaatattcattggctctgctttctggttctgtattcataattgttaggtacgaaagatcgctagctgcttacttttgacacattctctgcaaatagaggcaaatcctttataaagacaataccgattctacttctacgtcatctccgaacaaagattttccattcagttctttcaattcgatgatgaagtttacatatacctttttaggctttagtcttttcaccaattcgcaagctgctttcatggtgcctcctgttgccagcaaatcatcatgtagtagaattacgtcgttttcgtccagtgcatctttgtgaatttgcaccgtgtctttgccatactccttatcgtagctttcttcaatcgtttctgctgggagtttgcccggcttgcggattggaataaaaccggcgttcagacgggttgccagaatcggtcccataataaagcctcttgattctatacccaccactttggtgattcctttatccttatacatatcgaacatgatattggataattcctgcaagcaccatggatctttgaatagagtagtgacgtcgtagaacaggattccgggaatcggaaaatcgggtacttcccgaatgcttttgattagtgtttctttgctcataatcattgaattatatcgtttctttaaatgctttgtttcacgtgaaacgttgccgcttatcgtcccgaaagcaccagcagcacgttgatgtcgctaggagagactcccggaattctgctcgcttgcgcgattgtttccggatttatctttgccagcttttgccgagcttcggtggaaagggattgaatggtggaatagtcaaattttcctttaatcttaatactctccaatcgtgcaagtttttcagctatcattctctctctatcaatatatccttgatacttgattaggatttcggcagcttcgagaatctcttctttccggtcttgatccgaactcgtcgctttttccagttcgcgttgaaacgccggaacatattctgctatattttctattgtcacttgcgggcggttcagaatctctatcaacttacaaccttgacgtaggggcgttgtccctatcttttcgagagcattgttgattagtgccggtttcatcgaatagttgcgcgcgaaagaaatgatttgttccacggcttctttcttgcctcttactaactgatatcgatcttcttttgccaacccaagcttaaatgctttctctgttaagcgcatatcggcatcatccatgcgaagcagaatgcggtattccgcacgcgaggtaaacatacggtaaggttcatccacacctttggtaaccaaatcgtcgattaatacgccaatatatgcttcatcgcgagccaaagtaaatgcttctccgccgtggcagttaatgtgtgcattgataccggctatcaatccttgtcctcctgcttcctcgtatccggtggttccgtttacttgtccggcaaagaacaaatttttgataatcttcgattccaacgtatgttttaattgagtcggatcgaaatagtcatattcgatagcgtatcccgggcggtagataaccagatctttgaaagccgggatttgttttaatgctgcaatttgtatttccatcggaagcgaagaagagaatccgttaagatataactcttgtgtcgtttctccttccggttcgagaaataactggtgctgatctttatccgggaaagtgacaatcttggtttcgatgctcggacaatagcgtggcccgatactttgaatctgtccgttgaacaggggagaatccggcaaaccttcacgcagaatccggtgtacttcttcattagtgtagcatgtccagcattgaagttgctttaagtggtgcgtgctagtattcatgaatgagaacttgtggaagtccgattcgccgtcttgtgtttccatctggtcaaaatgaacactacgtgcgtcaattcgtaccggagtaccggttttcattcttccgtaggtgataccgtggcgggcgatggattcggtcaactgataggaagccggttcggccattcttcctcccggtaatttatgacgtcctacatgcatcagtccgttgaggaaagttcctgcggtgagcacaatgcatttcgctttgaaggtgacgccccatgcggtgaccaatcctgtgacctcaccgttttctacgagcagttcacatacggtatcttgccagatatgaaggttgggtgtattttccagtttctctcgccaggaccaaatgaacttagcccggtcgcattgggcgcgggggctccacatggctggacctttcgagcggtttagaattcggaattgaatggcagtctcatctgtcactaatcccatctgtccacccaatgcatctatttcacgtacaatttgtcctttggcgattcctcctacagccggattgcaactcatctgtccaatcttgttcatgtccatagtgatgagacaagttttggaacctaaattagcagcggctgccgctgcttcacaaccagcatgtccggcaccaattacaattacgtcgtacttaaaatccattcctatcttatttattatcaaacgctgcaaagttacagaaaagttgtgagacttgtatcttcaagctgtttttgcttctgaaaatccgaggaggaatccggcttaactgaaaaaaacgtcgtaatttcgggttagaaatatgcagattgttcgaaaatagaccgcttattggcttttgtgattgtatattttgggatggaatggcaatagtttgtcttttcaatcccttgttttgctttctttttgttagttgtgtgcttgctcaattatgagtgcaactagagagtaaaaggaaagatttgttgaaaatgcggattgttgtgaaaataaacgtgaggtttacactcaaaatctaccctacgtcttgacataagtcaaaaaaataagtctgaatgtaattttttgtatgatggcttttgctgttttcgcaaacagctatacctttgcagtgtagttgtgaaactacttatattttaggtattagaaaaaggtaataattaaaaggtattagtttataaaactaaggtattagattttaagattagtttttaggaaaaagattgttttgattaggtattaggaaaaagacgttttcaggtaaagagtaaatgaaagatgaagaaaaagaagaatcccatttatggggattctttaaaggtggggcggaatgattcgctctttttttgtgccctttgttcattctcttcacattgagataagtctcaatttatcagtctttttacgtgattcgttgagtgaaaatacctctttcacatccttcacagtcgtaagcgtctccgcgattctatatagtgtattaaaataaaaaggctaatgatccctttttagtcattagccttttcccatctgtcaggaagcagttccctgtatttttcaattggtgtgttcggttgccattcggctgttctgtttatcacatccgtgagatactcaaataaattcactttatgcatcctacaagtgagtgctatcgtatagagtatagcgcctcgttcggcccccttatgactgccgaagaacaatgagttttttctagataaggatatgtaccggttcatccgttcaaccatattgttgtccagataagtgtcaccataattaaagatgtccaccactgcattccactcattgcgaagataggtaatggcttcctgcagttcgctcttaggtaataaatccccccgttcttctatttcatcaagcacatcttttatttctccgagtatgtccggcgcatacttttttcgatgcataagattctgttctaccgtccatccctcagccccaactttatgcttatgctcgttttgataaagtgcgtttatcagctccacgatcctttttgcatccgggtccttctcaccgcaatctataaatttccgttttatatgttgcaagcacgggatgcgtgtgatattgggataagcatcgctttcgagcttccggtaaggtgagtaaccatcgctttgtatgatacctttgcaactgcctaattcgttaagaataactctttcagaccgggagccgtcatcatagagcaagtatatcatcctggtgtttatgccgacaaccacccaaaggtatcccttcctgactccttttcccttgctgttcttttccgggacgagtattttgtaataggtttcatcggctgccttataaggatcactcaaagctgtctgccggatgcacttataaagattttcgaagaggtttgaggctttctctatcaacttatgagccgtaggtttcttcagcgtaaagccatgactctcgaagtagttgatgattctttcaacaggtagcgattgtatataacgtaattccatcaatccggcaataaatgaaccgtcatagctggaattcaagaaggccgaagccggtgtttttccctcaaacaggcgaccttcttgcgtataggtgtgtatcttgtagacatgcttgatgaagcgcatgggtacacattcatagcggacgcatattctgggaacagtggtaaacaaccgggccttattgatgtcaaaatcgggatcatcgggataaacgacatgttcttcttcctccatctcataatgcatgtcacgtttggccccattattctttcttgctttacgcttatctgctttttccgcttctatcttctgccgctcttcttcggatatggcagattggggagcctgttgctgttcggatgtgttggatacaagtttggcgagtcccttagtaaggcgctgttgcttgctaagagattcgcctttttgaaggagtgcctctttaagggaagaaacctcctttatcaaagcatctatttggtccaagagtctgttgttgtcatctcgtaatcccttgatttgttccttcaataactctatgatctcatcctttttcatggcataaagatataaaaaatcaacgaattggccaaataaaccggatgatatctttagcacaaataactaataatcagaatgttgaattagatcctgaaacgctttctcaaccgtacagactttaatgacactccatttaagataaaagacaaaacctgataagaaatctcgtaattgcctgtattggggttaaatgtcggtaactcaaaacttccaccttcgaggcgcttgtagtacagaagaaagccatcgccatcccaacgcagtatttttacactttgtcggtttttaccaaagaataaaaagatatctccggaaacgggagacaagtccttcatttccgatcgtataattttgaataaaccgtcaatgccaaggttcatacgaacaaagccctggtacagatagtagcgattggctgatgttagagaatacatggatctccctcctttctttcgtaatcgcgcaacattttaataacaccaccgggtgtggcccgtttgaccgaaatggtggttccactgttaaaggtgattgtgatcccggcaagactaaactcttcttccgacaacatggcgggtgctatttgagtgaatgaaggagaggaagttgtcggttgggagggttcaacgccgccataataatcacggaccacatctgccttggcttgtttaacgctatagccccgtctggacatccaggaactcataccaccaaaagtggtatgctgatcgcggcaaacatcggctaaagaacaattgtagtctactttcaatgcttcaaggaaatgtttccaagtttttccaaatcgattttctgctaaatccataatgcttcatttttatacatagcaaaaatataagaatgaaaaaagggcgacaagatagaatcgcggagacgcttactcacagtcactaccgtgaaggatgtgccgcatctctggatacgccataataaccgggagcaggcacatacatcggctgattgcgcaaaccgatattcaccagctttccttctccacgcaaacgtaccaaatgcgttttggccgtagtacgtgccaaaccacacacttcctgaaaatcacggcgggtcatcatctgatgttcggcaaaatattctttcaacagcatatcaatctccacctctgacaccttctccgaatgacggacatacttggactgattggcgcggacacccacaaaatgtcctttcagattactgtcagggcgaaatcggacagttttgaaagccaccttattagtcttatgcggagtgctacgagtcactttccccgtagcagccaaagtgggataaaaatagccgatcccctcgatatgtacttcttttccctctcgcaacgactcgccgagaatcttcgataagttatcaagcacattctttacatcgcccacagtcaacgaactgtagtcatgaatcttgtaacaaagagtatccgtatccacttttccattcataaagatacgcggatgcaacgccgcttcttcttccgaagaagcattaggattttcataccaatcaaacacaatagccattacttcttatcaatttaaatgtgtaacttcatcataggacaactttaatcggctattcggacgattggaatcggctgttcagtcaactattgtcagccaaccggacaactccagtcggcttttcctaaacaagcgctaaagatacgacaaagtaacgatatatcagcatagaaaagcttgtttttcgtttcagaagaaaataaatattttcttagttaaatacttgcaaaccccatatttcatgttataccttagcggcatcaaccggtcgaaaaaacaacatttattcatttaaaaaacaagaaaaatatgaagacattagaatataactcgaaacgtttggcaaaaagaatacaagcattgatgaaagaatcgtcaaacgtcatcgtttcaccgaacacttcaaagaacgtaccgaaaatgcaagaaatagatgaacaggaagcatataaacaagaagtacataaacaccccgtccttctaacacgacaagtgattgactttttgaaagtacgatatgacttccgctacaacttactcaccgaagaaaccgaatttcgcccctccgggcaacgagaaattcctttctgccgcatagacaagcgagaactgaatactttctgcctggaagcccacaaagaaggaatcaactgctgggacaaggaccttcaaagatacatttactctaccctagtggaaagctaccaccctttccggctttatatgaacgaactacctgcctgggacggaacggatcggttgaagcccttggcgaagcgagtatccgacactcctatatggataaaaagctttcacacctggatgctcggacttgccgcccaatggctgggagtgaatcaaacacaagcaaacagcgtagccccgatacttatcagcgaagaacagggacgccataaatccactttctgccgtatgctgatgccgccacaactagcccgttattattcggataatctgaaactaaccgcacaaggcaatcccgaacgtctcctagccgagatggggttactaaacatggacgaatttgataaattcggagcacaaaagatgccgttacttaaaaatctgatgcaaatgtccagcctcaacatctgcaaagcctatcagaaaaatttccggtcgctgcctcgtatcgcctctttcatcggaacaaataaccggactgacttactgtgcgatccgacaggcagccgcagattcatctgcattgaagcggagcatgatattgactgtaccggaattgaacattcacaaatctacgcccaactgaaagaggaattgcttgcaggtgcccgtcactggttcaacaaggaggaagaacatgctttgcaacgtcataatagcgcatactatcatgtcaaccccatagaagacattgtgtgcaacatatacgcgcctgccatgttggatgaaccggattgtctgtcactctccgccgctatcattcatcaagaattgaaaaagaggtttccggctgtacttcgtaattgtactcctatccaattggcgcagattctgactgcaacgggtatcagtcgacagcatacgagattgggcaatgtgtatttggtgaagaaagtgaagggctgtgaagagtgagaatgatactacctgttcacataagatatctgtgaataagatggttacgcctctgtgacgactgtgaatgacagcatatatcatagcaatcagaaagtagtaaacaatcaagtcccgaacatattttgattggtaatgattttattgcaaataatgttattactaatcgaagtatttcttatttttatattcctctttaaagcttgcgccttttgtgccctgttgcgttttattttttattttgtaagtcggcaaggtctgcgtttctgaaaaaaaacaatatatttgcattcataaatatcgcaaaagtaagtagttacggtgatttttataaattttgttctcttttttcgcaggaaaagtgacagtatgaacgataaaattgacatcatagtagcgggagtaaaccggaaggataaaaagatgtggggcgatttctacgatcgtttttatactgctttatgtgtttatgtttccaagatattgccagtccccgatgcggtggaagatttggtacaggaagtttttatttctgtatgggaggggaagcgtaccttttctgatattaaagaacttaccaattatctttatcgtgcctgctataataatgccttattatatatacgtaataatcaaattcatgatactattttaagttctttggcggaagaagaaagtatggtggacgaagatacgatttatgcactgacagtaaaagaagaaattatccggcaactctattgctatatcgaagaacttcctgccgaacaacgtcggattattttaatgagaattgagggacatacatgggaagagatagcggaacgtctggagataagtatcaatactgtcaaaacccaaaagactcgcagctataaattcctccgtgaaaggttgggggattccattcattccataattctttttttatttttctaaaaataaaaaaacattctgatacttctttgtctttttattgattgattaaaatttattctatttgttaaaatcaaatctttttcttctatataatgacattatgatatatttctacctctaaattctgattcattattcttttatctcaaaaaaatgtcatctttttgtcacccgtttttatgagttgtgtatatctataataaagatgaattaaacaattgtttaattaaaaaaacgcaataagatgaagaagttcgaaaatgtatatcaagacgctgctttaatgagaaaggttcttttgggggaggctgatgaagtggaacaaaaagatcttgagaaacggttggcagaatgtccggacttacgaaatgtatacgagcagttacagagcggggagactttgaaagtcgcctttggagaatatcaaaaatattcgtcaaagaaagcttatcagtcttttcttcagagtatcgggcagatggaatcgaaaggccggaagagtcgttctcgtcgggtggggtggtacgctgctgcggctgtcgttactttagccgttgctctttctttctatatgtcgaattatatctcatcggaaaaagaagggaaaactttgattcagccgggaacgcagcaggcacaattgactttgtccgatggcagcgtgattgatgtgcatagaaaagaagtaagcgtagtagtagatggcgttcaagtaaaatataagaaaggagtgctgtcttatcagcctaccgtcacgacacaacatgaggagaaaaacattgaagaacaatctggcaaatcaaatgaactggtaataccgcgtggaggtgaaaatactgtaatccttgcagatggaacgacagtacatttgaatgccggttctaaattgacctatccggtacgttttgccggtaaacgtcgaattgtgcgtttggagggtgaagcttattttgatgtagcaggagatgagaatcatccatttgtggtacaaactcatctcggggaaataactgtacttggtactgaattcaacgtgaatgcttatgccgatacccctgtttgttatacaaccctagtacatggaaaagtgaaattctctacattaaatgcggaaacggttactctctcaccgggtgaacaagctgttgtatttgccaatagttcaacgaaacgcaaggtggatttggaagaatatgttggttgggtagatggtatgtacatctttaatgaccgtcccttgggcgatataatgaagacattcgaacgctggtacgacatacaggtttattacgaaacccctaacctgcgcgacattacctatagtggtaacttgaaacgctacggaacaataaattcattcctggatgcactggaactgacaggagaccttacttataaaatcagtggcaggaatatattgatatatgacaaagtggaagaacaggaatggaaaagatagaatattagaatagttagaatattaggtacacaaaagtttaattattaatttatgagagaaaaacgatggctgctatgttttctagtggcaatgtgctgtacgtttagtgcatgggcattaccgtcacaagacaagacggtgactttgaaactgcacaatgtctctatagagactgtcctggatgcagtgaaaaaacagacaggtgtgaatatgttatataattcacaaatgttcaagggtgttccttcggtatcacttgatgtgaagaacgagagatgggatacaactcttaaattagtgttgaatcctcaagggtttgactatgtgatgaaagacggtattgttgtcattcgaaaacaaaagcgtgaaaaccgtgtccgtggtatggtgacagactcacatggagagccgattcccggagctagtattattgttaaaggtactcgtacaggtacttctaccaatattgaaggtgaatttactttggacgtaaaaagtgataaggtggtgttggaagtttcttttataggtatgaagaagcaaactgtccaagtggatgctactcgtcggaaaacggttgaaattacattggtggatgatgtcaaaacattggaagatgtggttgtgaccggatatagcaatgtacgtaaatccagttttacgggtagttcgactcagatttcgggtgatgacttgcgtaaggtgtcacagacaaatataattggggcgatccagtcattcgatccctctttccgtttggtagataacgtacaatttggttctgacccgaatgctttaccagaaatgtatattcgtggacgttccggttttggcgttaaagaactggataaagatcagctttcaaaatcaaatttggagaataatcctaatttaccaacttttatcatggacggttttgaagtaagcattgagaaggtatatgacttggatcctacccgtattgagagtttgacggttttgaaagatgctgctgctactgctatgtatggttcacgtgctgctaatggagtggtggtaattactactgttgctccgaaagcaggagaggttcgtgtctcttataactttacaggaacgttggaaatgcccgatttacgggattataatttggcaaatgcatcggagaagctggaaatagagcgtctcgcaggattatttgataaaggacaagctaacattccatcgactgcggtagggatgaacaactattataagaaatacgctttaattcaaaaaggagtagatacggattggatgtctattccacttcaaaattctttcaatcataagcacagtatttacttagagggaggaacacctaatttgcgttatggtgtggacggttcatttaatatagcagatggtgtgatgaagggtacagaacgtaatcgctatagtgcaggcttctctttggattatcgcatcaagaatttgcaagtaagaaactatgtatctttcgggcatacgaaatcgaaagaatctccgtatggttcgtttagtgattttagcggactacagccttatgactctccttataaagatgatggaacactccgggagaaactcacatattcgaaaattagcggacgtgacaataataatccgctatatgaagcaactttgggtaattataattggaactcttatgatgaggttattgataatttgagctttaactggtacctgaatgattactggacggttaaagggcagttcagtgtaacgaagaaatattccaaatcagagaagtttattgatccgctttcaagtaagactagtgttacaggttcaaaagataataatcttgccggtgatttgtatacgacgaatggagaaagtttggattggaattccaatgcttttttatactatacacgtagctttaacaagcagcacaatttgaatgtttcagcaggttgggaagcagcttcaggtaccactgagagtaccaatgctcattatcgtggatttccgtcgggtgagtttcactctctgaattatgcggcggaagtatataagaaacctactcgtactgagaataccacacgaagggttagcgtattagcttctgccaattatacgtggaatgatatttatttggtagacgcttctgtacgtttcgacggttcgtcagagtttggggcgaatcagaagtgggctcctttcttctctggaggtttgggtgttaatattcataactatgatttcttcaaaagtaacggatatatcaataagttaaaattacgtgcttcttatgggcgtaccggtaaagttaatttcccggcttatgctgcaacgacgatgtatgaaactttatttgatgaatggtatataacaggttatggggctgtattgaaagctttaggtaataaagatttgacttgggaaaagacggataagctgagtgttggtatcgaaacaaaaacgttccatgatcgcctgactgttgatttcgagtattactataataagacaattgacttggtgaatgatgtcactctttcccaaacttccggtttctctacttacaaagataatatgggacaagttgccaacaaaggcgtagaattaaaacttcgtgcggatatttatcgtgacagaaactggaatgtggcgttatggggaaatatggcgcacaataagaatgagattctgaagatttccgactctcagaaagcatataatgagagagtggccgcttattataaaaatgaagcactttatcaagaaacattagggctgtctcatggtgcggaatattcggtaccactgccacagtatgaggaaggagcttctctgacttcaatttgggctgtacgttcattgggcattgatcctactacgggtaaagagatctttttgaaccgtgatggctctatagctgataagtggaatgctgcgcaggaggttgtagttggaaatacagaacctaaatgtagtggtgctttcgggttgaacctgtcgtataagaattggactctgtttgcttcatttctttatgagtggggtggacaggaatacaatcaaacattggtcaacaatgtggaaaatgcggacttagtgaacaagaatgtcgatttacgcgtattgacggacagatggaaaaaaccgggtgacatagctcagtttaaagatattaaagaccgggggatgactactttgccaacatcacgtttcgtgcaggataaagcattggttcgattgaattcattgaatgtcagctatgattttaaccgtgactggataaaaaaacatctccgcatgaatctgcttcgtctggaagcttctacgagcgacttgataaactggtcctctattaaacaggaacgcggattgagctatccgagatcttggaaagtggaattctcattaaaagcacagttctaaaaaaagaagaaaaaatgaaaaagatatatacaataatatttgtgtcatgtctagcagctatctcgttcagttcttgtagtgactggctggacgtgagacctgcggatgagataaaggaagaatatttgtttgagacaggaaatggttatcgtacagctctgaacggtatataccggaagttggcgactttcgatttgtacggtagtaatctgagctgggggttgatagatggctggggacaggtatatgacttggacaaagcccccgacagcggtggtggtaaagctatgaagaaattatcgaagtttttgtataagaactctgaacttactcctacaacagatgctatgtggagcgcagcgtggaatatcatagccaattgtaataaccttgcacagcaggtggcagaggaagatacaatgctgttctacaaacgtacgcaggagaaaaatatgattttaggagaagctattgccttacgggcgtatatgcattttgatttgttacgtatatatgcgccgtctttggctatgaatccgggagataggctttttattccttatgtggacaaatatccatcttatttatccgatcgacaaacagtcggttactgtttggaacgcatcatcgctgatttagtagaagcgcaaaagattttgaaggatgtggataagtcatcagagtttacttcgggtaatcgttttactaagtctccttccggagaagaacgttttgtgtggtacagaggattccatcttaattatcatgccgtaactgcggagttggctcgtgtttacttatatgcaggacaatcggaaaaggcctatgaaacagcgaagttactaatagatattaatgctgataaaggttattataaggcagtaacaagtagttatagtggacctatgaatatagagaatgggaatataaagatgtatgaagacattatatttgcattatattctacagatcagactgattgggatttggagattaatcatgcaagtgataatgctaccaaaccggatgatgaaaagtatctggctttgagtgatgctgtgataacgaaattcttcggtaccgaaagcgataaagactggcgtcttaagtatcagttaggaccgaatacttcttctttttatcgttcattgaagtataaaaaacaagatgaaggttctggttttggtaaagtgaatagtacaatggtgcctatgattcgtatgtctgaagtatattatatagctgcagaggctatttatgatacagataaggaattggccaagacatatcttaaaactgtgaaacaagggagaggtattagttctcctgaccttagcaaatcgggtacgaagcaagactttattaatctgattgttgatgacgcccgtcgcgagtttattggcgaaggacagactttctttttatacaagcgtttgaaacggaacttggaagggtcggatgaaaagcagtccgtagaatatccggcgattgaagataatttggtgatgccattgcctgattcggaaagcaatatttaaattttgaaagattgaagatatatgaaaagaataagtttttatatagtcattgtattgttgggagtctccttctttacttcttgtgaggagcaaggattactgacccatacaaatgatgtgtcatatattgcatttgagaaaaatatgacaacagatacaacaggtgtatcttttaagttttacaatgaaggtgaaaatgctaagatattattaggagttaccatttctggaaaagtacaggataaggatttggagtttacggtcagtgtagatccggaacgaacgactttgcctgctacccaatatgaattgccagagaagtgcgtaattaaagcaggagaactaaccggagaaatattggtggttctgaagtattacgaaaaattggatacgaaagctgaactgctgacgttgcaagtgaatgacggtggtgaggttcgtcaaggtccgagtgtctattcacgtgctattatttccgtatctaatttgttgtttgcacctgagtggtggactagaaacgacggtgatgtgaataatccctacaacattgttgaagaatggtatttggggaggtattcggaaaagaaatatttaatgtttttggaagaattgaaaaaagacggggtggtatttgacggaaaagatatgtttatattgcgtaaatatgcactgcgtctgaaaaatagaattaaagattataatactcaacatccggatgaacccatgagtgatgagtatggtaaaatggaaattcctgttgccggataattaaaaaacggaggaagtatgaaaaagataacagtttatattttattactacttttattgagtagcatttgcagttgcctggatgataaaaacaattatgattatacaccgattaatgaactgaaaggcactattagtaatattgaaaaaaactatagtgttgggatagatgaagacttagttataacacctacgtttgagtttacaattgataaaacagatccggatgtgagttacgaatggagactagacggagaattgttgaatgtaaaagcaccttcgtatactttcaattctcataagatcggattgtttgaactcacattttccgtcatcgacaataaaacaggggttaagtactctgcttcaacagacattttggttcgttctccttatcagagaggatgggtggttttgtctgacgtagatggaaagtcaacactttcatttatcaagattaagaccttgtatggtgtgtcagaaactgtgaatatctggggtgagaaagtggtacgtgattctatcgcatatcattctgtcgaaaagtatttagtcaaagatttaggaaccaaccccaaaggtgtttttgagcatttgggttatcctagtactttcggacaggtagagactgtatatgatgaactggtagtgatgcaagatcgttgggtggagctgaacggtaatactttggagcgtgaagtatatacagaggatgagttctatggggatttgccggtgggaggcttcaaacctgtagaagctgccatgtcttactctgcaaaatttattcgtgatgaaaatggatatatttatatgcacacgaagccggttgcaaatgattttcatgctggagcctatatgtctattccactgtggaattatactaaattcagtgctttatatcctgtacagaagtttaaggacagaaatatggatgcggttctggctctccgtgaagaggataactcattggtaattattcgaaatggaggtggggtgaagaatagttccaatgatccgacattttatgataatacggtgaaggataccggagaaatagttgaatttgaaggagaggatgctaagaactttcagaatatgcgtgatgaaagtattgtaacaatgaaaactgcgtcagttaatgtgaatggcgacatgatgcaagcatgggttgccttgatgaagggtaacgatatgtcttatcaattgcgctatttcagaatgaagaataaaaaatgggatatatatgattattatgaaaatgacttgacgtcattgaaaaataaagagtatacagatatggctgtatttgaacaaaagcagtatgttgttattgcaatggggaatgaattgtggtattgccaatatgtgaaaggtatggcatctgctccaaaattgattcatacatttgacaagaaggtgattgctctttcatctaatgatatatatttgtatccaaaatatggagtttacaacggtcagttaggggttgccttggaagacggaagtttctttatatatggggtggaagagaaggacaagcaagaatcaggattggttaatgatgtaaaaataaaacaattatacccgaatgaggaaagtgagaaggagggagataataattttggaaaaatagtggatgtactatataaaataggaaatgctaaccagattgttcagtatgacctttaaaataacttgatctatatagattatgcggggaatcgcattgagtcttgaatactttatgtgattctcctttgtttatttgaatatgagaaaaagaatattatttatagttttatttgcttggtcaggcattctgcatgctttttcccaacagcaggccaactatgaattggcaaatgaatttcaggctttcggtttagggggtaattttactgctaatagtctaaatctctggccgaatgaaattaatggaacagataagttttggtttgaatttcatacgactgtcgggaaggattactattttgtagatcctgaacgtcggttaaaagaaccattgtttgataaagggaaactggcatcgggaattgcacagattactaggggtgtagtggacaggaataaactggagttgagtgatatcaaattttctgaaaacctggcttctttttctttttcttataaaggtaggaactatgaatataatcgcctgacacaccagattgtagagaaaaagaaagaaaagagtcggtcattatttgatcgttactcatggatgaaatattcgccagacagaaaatatcttgtgtatgtgaagaaacacaatctgtatgtgaaaggtaatggggagatgggaatggatacgacggaagtgcagttgaccactgatggagttcggtattattcttatgcgcatgatggaggaacggacgaagaaggagaagtcatgtctgatatctgttggtgccccgattcaaggcatctttatttagtacgcgaagatgaacgtctgcttagagatttttgggtgataaattcgttggatgacaggccttccctgactacttatcgttatgaattccctggtgataagaatgtaacccaaaatgaactggttatagttgacgtgattgggcgtaccgtaaaaaaaacagacataagtaagtggccggatcaatacataaatcctttgtgtgtgacaaaggatagtaaatacctcttttttgaacgtacgaaacgtacatgggacgaagtggatttgtgttctgtcaacctctctacaatggaggtgaaagaaataattcatgaagttgacaaaccgtatcgtgatccgcatgctcgtagtgtcgctattttgaatgatggtaaagatattctttttcgttcggagcgtacgggatgggggcattactatcattatgatggtaatggaaagttgaagaatgtgatgacttccggtgagtgggtggcaggtcagatagcttctattgatactttggggcgaacagtatatctatatggatatggcagggaaaaagatattgacccatcttattacatgctctataaagtgcatattgatagggaaggagtaactccattaagtacggaagacggtcagcatcaggttaaattcctgaagtctaatagatactatattgacacttattcaagagtggatatggaacctaaaatcatgttgaaagataacaagggacaagggattcttgaattggcaaagccggatattgaattagcctacaaagccggatggaaaaaaccggaacgttttgttgtgaaggctgctgataatataaccgatttacatggagtaatgtggaaaccggcagactttgattctactaaggtatatccgattatttctgtggtatatccggggccttactttggtcaagttcctacttcatttaccttagaagacagatgttgtacccgtttggcgcagttaggttttatcgtaattgctgtgtctcacagaggagatactcctatgcgtggaaaggcataccatcggtttggttatggtaatatgcgtgattatccattagctgatgacaaatatgctattgagcagttagctcggaggtattcatttattaatggtaaaaaagtcggtatctacggtcattccggtggaggatttatggctgctgcagccatctgtacttatccggacttttataaagctgctgtctcctgttccggaaatcatgataacaatatctataatcgtgggtggggagaatgctataacggtgtgaaggaagtggaaaaagtagtaaaagatagtttgggtaatgagacaaaagagtatggatacaagttcaatgtgaagccgaatacggagattgccaagaatttgaaaggacatttaatgctcgtcaccggtgatatggacaagaacgtgaaccctgctcatacttatcgcatggcgcaggcattgattgaagccggcaaggattttgatatgctggtgattccgggtgccggccatggatatggttctgctgataagtattttgagaagaagatgtaccgtttctttgccaagcatttgctgggtgatactcgtgcagactattggggagatattaaccgtaacaaataagacaatagataagattttatgaaaaactctctctttagatatgtgtgcctggtggttgcattgttgatatgtagctttgccgatgcacagcagaaagcgaattataagttagcggaaaagttccgtctgttagaacagaatcctataataaagtattcaacagaagtcaagccaacgtttattaatggtacggactgtttttattattcgtttactacacgtgaaggaaagaagtattattatgtaaatccgaagaaaaaggaaaaacgtcttctgtttgatacggctgaattattgagtaaaattgcagtatataccaagaaagcctattcttcggcagatccatatttgtctttcactttcatgaaggataacgaaacgattcgtattgattttgaccgtggactttatacgtacaatattcatacgaaagcactgaagcagcttaatgagaaaccatcttatggaaatagtgatccgtattggatgaagtattctccagatagtctttattttctttatgccagcaaggataatttgtattttgttgggaatcaaaagaaagggcaagataccattcctgtacaactgacaacggacggtgagccgaattatacatttaaccgtgaagatgagggtaagctggaaggacgcttcggagccgaatctactcattggattccaggtagccatcgtttttatgctgttcgtgaggataacaggaaagtgcgtgatttatggttaatcaattcgttgtctactccatatccgacactgaaaacttataaagccgaactggcaggcgataaacatgtcacccaatatgaattgttgattggagatgtcgatacccgtgaagtgaagaaaatcgatattaatcgctggcctgatcagtatattgacatattgtatatttcaaaggacgggaagcgtttgtatttccaacgttataaccgtccatggaaccagtcggatatttgcgaggtagacgtagaaaccggaaaagtgcgcgtagtgattcatgaagaaaacaaaccatatctcgattatcagatgcgtaatgtttctttcctgaatgacgggaaagaaatccttttccgttccgaacgtaatggctggggacactattacctgtatgacacagcaacgggaaacttaaagaaccaactgaccgatggaatatgggtagctggtccggttaccaagattgatactatcgggcgtaagatgtatttctatggttatggtcgtgagaaaggcattgacccttattattacattctttatgaagctcaactggatcgtccgaatgctgttcgtctgttaactccggagaatgcgtcacatgatgtcagtatctctccgtcttaccgatatatggtagattcttattctactgtttcgcaggaaccggtgaatgtggttcgtaaccggaatggaaaggtgattatgacgttggaaaagcccgatttgcagcctgtctatgagatgggatggaaagcaccggaacgctttaaggtaaaagctgccgatggagtgaccgatttgtatggcgtgatgtggaaacctgccgactttgactcgacaaaggtttatcctatcatttcgaatgtttatccgggaccgttcttcgaatatgtgccgacacgtttcacgattaatgatgtttataatacccgtttggctcaactggggttcattgtaatcactgtggggcacagaggtggcactccgatgcgcggaaaggcttatcatacctatggatacaacaatatgcgtgattatccgttgacggatgataaatatgctattgagcaactggctgcccgttatccgtttattgatgccaccaaagtcggtatttacggccattccggtggagggtttatgtcggcggctgccatttgtacttatcctgatttctattcggctgctgtttcatcggcaggtaatcatgacaatcgtatttataataaaggctttgttgagattcatttcggtgtagatgagaaggtgaaaacgactaaagatagtttgggagtagaaagtacgatgtatgattatagtgtccgtgtacgtccgaatcaagagttggtaaagaattacaagcacggcttgttgctgtttaccggtgcgatggataaaactgtgaatcctgctaacacattgcgtctggtggatgcattgattaaggctgataaggatttcgaaatgtttgtattgccgaaatgtacacatggattcttcggtgagtctgaggatttcttcgagcataagatgtggcgtcactttgcccgcttgttattgcatgacaactcggctgattctgatgtcgatttgaataaggatatgattaaagatgacaggagaagataagatgaaccggatatttgtatatatagggattatagcaggattgttgctggggggaagcttgtctgttgaggctcaaaagaaaccgttggatatagaagcatgtacatcttggaaacgtattgatgcaccggatatttcaccgacaggcagatgggtgacttaccgtatatcgttgatggaatataatccggctagcaaggaagaaaaaaaactgcatttattcgattcccgtacgcggaaggaaatattgctgaatggcgatatagagcgtctggagttttataataacgaccagggagctttttatcggttggcagactcggcaggagtaatgaaaacatttttgttgtcattgccttcgggagtaaagaccgaatggaaacataaagaggcttttcgtcctgtggaagggaccccttactcaatctctgtaactaatgtgtcgaaagatacggtaaatcatgttccggcttttaacaggctggtggtacgtcatctgaagacagaagttgcttttcatattgacagtatcggctatcatacattatatgacggaggacgttctattcttttcattcgtaaaaagtcagacaggaacgagctatgctatggccctttagctggtccatataagactctttatcagagttctgtaaagagtgaaccctcttcttatagttttaatgaaaaagagatgatcggggagtttagcgtaaatgattctttgtggtatgctttttcattaaagaagccgggttgtaacttgctttttgaccggaaagaaattgttttgcctgatggtatgtctgtcggacgtattgacttgtctaaaagccataattttttgatacttgaacttcgggactcacagcagatttcccgtagaagggaagaatcggagaagaaaccggacaagagttttgaattagagttgtggacgtggaacgaaatggaagttccgactttacaaaggggcggacgttataggcaggataagtcggtgacgtatatttatgatattttttctaagaagctcacagaagttgctccatttaccgtagatttactcttaccatcgggagcagagaatttgaactatgtgctttacacagatgaatctccttataagatgcagcgtgagtggttggatcggttgccgttcgatatatattcagtgaatgtgcatacaggtgcaaaacggttgatcggacgtagttatcgtacagctcccaaatggtcggtaaatggcaagtgggcagtaatgtatgatccgattgctcaagtctggaataagtttgatggtgctaccggtaaggttgttaatatatctgatgctatcggttatccaatgttcatggaaagttatgataaaccggctcctgctcccgcttatggaatagcagggtggacggctgacgggaataatgtgtttctgtacgatgcatatgactggtggaagattgatttgacaggagaacgtcagccggagtgcctgactaaaggatatggtcgcaagcatggcaaatctattcgtaaaatgacgagtaatatagataaggatgtttttcagaaagacgaaaaagtcatagttagcctttgggataaagacacgatggatgagggtgtctatcagcttgatatgaaaggccgtctgagaaaattgatggaggggaattatgtatatactatacatcgtttttctgacaatcatgagtattgcgtttggaatcgtcagaatgtatcggaatttagggatttgtggtggagtaagtccgatttctccaatcccgttaaagtgacgaatgcgaatcctcaacaagcagattataaatggggtacagttaaactgataaagtggactaattatgagaataaggaaaataaggggttgctttatcttccggaagattatgatcctcaaaaagaatatccggcgttggtgcagttttatgaaactcattccggtgagttgaatatttatcatgcacctttgttgagtagtgcgttaggggatcctatgtattttgccagcaatggttatattgtgtttatgccggatgtgcatttcacggttgggactcccggtcagagttgttatgatgctgttgtgagtggaacgaagtatctgatagagcaggggatagcacatcccgggaaaataggcttacagggacatagctggtctggctatcaaacatcatatttggtgacaaagacagatcttttcacttgtgccaatatagcggctccaattacggatatggtgaccggatatttgggaattcgtaatggaagcggtctgccacgatattttatgtacgaggaaacacaaagtcgtatgggaaagactttatgggaggcaaaagataagtatctggcaagttcagcaattttggaggctgataagatacatacacctttgttgatattacataatgatgaggatgaggctgttgcatatgaacaaggacgtgctctttatttggctatgcgtcgcttacaacgtcctgcatggttgttgaattacaaaggtgaaggacatttcgtactgggaagaggtgcacagaaagactggacaatccggatgatgcagttctttgactattacctgaaaggaacaaaagaaccacgttggatgaaggaaggtattcatctgcgagagcgtggaattgatcagaaatacgatttactaaaaaaataaatattgatttaagatgaaaaaattattgattacggctatggctctgtcttgtttcgctttaagctacggacagaagaaagtagaaaaacagattatcggaaaatggtgcaatccttatacatacaagtctacgggtgagttgaaaggatttgagttcaagaaaggtggtaagtgttctactatcaatattccgtctttagatttgaaaacgtggaaagtggataatggttatctgattgtggaaggattcagcaaggaagatgatggaaaggttgaggtgtacaaaactcgtgagcgtatcggctacctgacatcggattcattgcagttgatagtgaacgaaggaactcctcgtttggctttcctgtacctaaatacaaaatcaattaaggaactggttactcctgaagtgaagtaactccaaactattaataaattgactaaatctctctcttaataatttagtgttaattagcataagctaatggagtgcctcggcgtagtgattacgccggggtttcttttttatgaaaggcgaattgaaaagcagtgtacgaattgaaagcaatgagcgcttatcgcaacatccccaatgccttattctcagctgcttccataacttcccgttctccgggacctttatcgttgatgccgcacaaatgaagaattccgtggataatcacacgatgtagttcgtcttcgtatgaagcaccaaactgttccgcattggtgcgtatcgtatccaggctgatgaataagtcacctgatagacgatcgccttcacaataatcgaaagtaataatgtccgtgtagtagtcatgttgcagatactgacggtttacctccagaattttttcgtccgagcagaagatataagcgatttcaccgagtcttttcccgtaagaagcagctacggtctttatccattccgtagtctcacgtttcttgatatcaggcatttttacgccttctgtttgataagttacagccataattgaatgttatgatttaaaagaaaaataaataactgattaagatagcggctatgatacccgagaagtctgctatcagaccgcaagtcactgcattacgagtcttggttatacccacactgccgaagtaaacggccagaatgtagaatgtggtatctgaagctccgcgtactacgcaactcatacgccctacaaatgaatccggtcccagttctttcatcgtatcgatcatcaagccgttggcaccgctaccgctaagcgatttcatcaatgcagtaggcagtgcccctacaaagctcgtgtcaactccgcatgagcctactatgtagccaatgcctcccactagaaaatccatagctcccgaagtgcggaacacggcgattcctacaaggaaagcaaccagataaggtatgatacgtacagctgtcgtaaatccttctttagctccctctacaaacgaatcgtatacattgatttttttcctgactcccgtcagaataaacaggataatgacactgaatagcagaatattcgctatcaatgtagaataagtacccatatcctctcgtgaaacgcttaggaacagataaatcaaaccggaaaagaaaaggcagataacgcccattaaaatgagaataggcttattgattaagtttatcttttgagcgatgctgactgctatgactcctactaaagttgaaatgaaagtacttagcaggatagggataaatacatctgtaggctgtgcagcccccatttgtgcacgatataccatgatactgatcggaatgatgataaggccggatgtattaatcaccaaaaacataatcatcggattggaagcagtgtcctttttcggattcagatcctgtagctctttcatagctttcaaccccagcggggtggcggcattgtcgagaccaagcatattggcggacatattcatgaagatggagcctaacaccggatgccctttaggaatgtctggaaacagacggcaaagcaccggactaagaaagcgggccagtgcattaatcaatccgctgttctcgccgattttcatgatacttaaccaaagggccagtacacccgtaagtcccagcgatatctcgaaagctgtctttgaagagtcgaatgtagcgttcatgatagccgtaaatatctccgtatctcccaaaacaatcacttttataagagcgatgataaaggcaatgacgaagaatcctatccaaatgtaatttagaaccatagttgataacgtgtatatagatagtgcaaaagtagttattacgtttcaaataaactaaatcttcgtctttcttatactgaaaatgaatgtaaatctctatctttgtctcctactttcaagaaataaatggaacaggaagattttaacatacgcgaacatcagcttacttcaaaagaacgggatttcgagaatgcactccgtccgttaagctttgaagactttagcgggcaggacaaggtggtggaaaaccttcgcatttttgtgaaggcggcacgtctgcgtggcgaagcactcgaccatgtgctgttgcacggccctcccggattaggaaaaacaactctttcgaatattatcgctaacgaattaggagttggctttaaagtaacttccggtccggtacttgataaaccgggtgacctggcaggtgtattgaccagcctcgaaccgaacgacgtgctttttattgatgaaattcatcggctgtcgcctgtggtggaggaatatctttattcggcgatggaagattaccgcatcgatattatgatcgataagggaccttcggcacgcagcatccagatagatttgaatcctttcacgctggttggtgcaaccacacgtagcggtctgctgacggccccgcttcgtgcacgtttcggtattaatcttcatttggagtactatgatgatgatattttgagcaatatcattcgtcgttctgcgtccatactggatgtgccttgttcggtacgtgcagcatcggagatcgcttcccgtagccgcggaacgccccgtattgccaatgccttgcttcgtcgggtacgtgattttgcgcaggtgaaaggctccggttctatcgatacggagatcgcccagtttgcattggaagcactgaatattgataagtacggcctggatgagatagacaacaagatactttgcaccattatagacaaatttaaaggtggtccggtaggtatcactaccattgccacggctttgggagaagatgcgggaaccattgaggaagtttacgaacctttcctgataaaagaaggatttatgaagcgtactccccgtggacgtgaggtgaccgaacttgcctataaacatttgggaagaagtctttataacagtcagaaaacgctgtttaatgactaacataaagcgtcatgtgacaagtggtattaacggtataaaagaactttataaagcatagttggatgatgaagcaatggactactttacttgtttttctctttttgagcttgtctttatcggctcaacaggaatatgggagggatatttttgtctcttctaaaggagactctttaccttatcggatgattcatcccgaatcggtgaagccaggtgaaaagtatccgctcgtactgtttctgcatggagccggcgaacggggaaatgataatgagaaacagttgactcatggtggacagatgtttcttaatccggtcaatcaagagaagtatcccgctttcgttctaattccacagtgtccgacagacggttactgggcttatacaggacgtccgaagtcgcttatccctacagaaatgccagtgggacaagagatcagtcctatattgcaaacgcttaaacagttgctcgactcttatctggtaatgcccgaagtggacacacaacgggtttatattatcggtctttcaatgggagcgatgggaacgtatgatttagtcgtgcgttatccggagatttttgcagctgcagttcctatttgcggtacagtcaatccaagtcggctatcggttgccaaggatgtgaaatttcgtatctttcacggagatgcggacgatgtagttccggtgaaaggttctcgcgaagcgtataaagcactgaaagctgccggtgcagatgtggaatatattgaattccccggttgcaatcatgggagctggaatccggctttcaattatcccggatttatggattggttgttcaaacaaaagaagaaacgttgaaccaatctaaatgataattactaataaaacatggctggactaaaatcattagctaaagatacggcaatttatgggttgagtagtattgtcggacggttccttaactacatgctggtgcctttgtacacagcggtattgccagcttccaccggaggttatggagttgtttcaaacgtatatgcgtttacagccctgatgcttgtactgcttacgttcggtatggaaacgggattcttccgttttgccaacaaatcgggagaagacccgatgaaagtatatgccaactccttgttatcggtaggaggggtatctttgatttttgttttcctttgcttgttattcctgcaacctatttccaatttactggattatggcgatcatccggagtttatagcgatgatggctgttgtggtagctttagactctttccaatgcattccttttgcctatttacggtataaaaagcggcctattaagtttgctgctattaaactgctctctatcgttggtggcatcggtttgaatctatttttcctattggtgtgcccgtggctgaatgtacattgtccgtcaacgatctcctggttttatgatccggattatttagtgggatatatctttattagcaacctgattatttcggttgtccagatgttcttctttattccggaactgacaggttttgcttataagttggacaaggtattgctgaaacgaatggtcgtatattcttttccggtattaatcttaggtttggtaggtattctaaaccagactgtggataagatgatctatccgtttctttttgaagatcggcaggaagggttggtgcaattgggtatctatgcggcaaccagtaagattgcgatggtgatggcaatgtttacgcaagctttccgttatgcttacgaaccgtttgtctttggcaaagaccgagaaggagacaaccggaagatgtatgccgctgcgatgaagtattttcttatattttccttgctggctttccttgctgtcatgttctacctcgacttgctgcgttatctggtggcaaggggttactgggaaggcctgggggtagtagctattgtaatgcttgcagagatctgtaaagggatctatttcaacctttccttttggtataaactgacggataagacctattggggagcctacttctcggtgattggttgtgttattattgtcgtattgaacatcctgtttgtgccggtttacggttatcttgcttcggcatgggcttctgttgcaggctatgcagtcatcttgctgctatcctactggataggacagaaagaatacccgattcattatgacttgaagagcctgggactttatgttctgctggcagcggtactttacgttattggagagcaggttcctatccctaatatagtgctccgtctcgctttccgtaccgtactcttattgctatttatagcttatattatcaagaaggatttaccattgagtcagattcctgttattaatcgatttataaagaagaaataactatgaagacagatgaacgtaataagtttgctatcaagtcctttctgggagaatatctggacttgaggaaagataaggataacgaactggccacagtggattctatccgtaagggggtagagttcaaaggtgccaatttatggattctgatctttgccatattcatggcatcactcggattgaatgtgaactccactgccgttattatcggtgccatgttgatttctccattgatgggacctattatgggagtaggactgtctgtcggactgaatgactttgaattaatgaaacgctctttgaagagctttctcataacgactgctttcagtgtgactacggcaacaatctttttccttcttgcccctattgccggttcacagtcagagttgctggcacgtacatcgcccactatttatgatgtattcatcgcgctttttggtggtttggcaggtgtcgtggctctctctaccaaggaaaaaggaaatgtgattccgggtgttgccattgctactgcattgatgccgccgctttgtacggcaggttacggactggcttccggtaatctcatttatttcctgggtgctttttatctttactttatcaactctgtttttatcagcctggctactttcctcggtgttcgtgtgatgcatttccaacggaaagagtttgtggataaaacccgtgagaagaccgtacgtaaatacatcgttctgattgtagtgcttaccatgtgccctgcagtttatctgacatttggaattataaagagcactttctatgaagcagcagccaatcgttttataaacgatcagttgagctttgagaatacgcaggtacttgataagaaaattagctatgaccataaagaagtacgggttgttttgattggtcctgaagtgcctgacgcttcgatatctattgctcgtagcaagttgaaagagtataagctggaagatacgaaactgattgtattacaggggatgaacaatgaggcggtagatgtatcttctatccgtgccatggtcatggaagacttctataaaaacagtgagcaacggcttcaacaacaggcggtgaaaatttcccaactggagacaacactggagcaatacagaacgtacgatgctatgagtcgtacattagtacccgaattgaaggtactttatccttccatcacaactctttccatcgctcactcgctcgaagtgcgggtcgattcgatgaagacggatacggtaacattggctgtccttaaattcgccagacatccgtctgttgctgaaaaagagaaaatcagcgaatggctgaaagcccgcgtaggaacgaagaagttgaggctgattacagaataatgaatctaaaaataataatatgaagttcagactaaccgtcttgatagtcttttctctctgtctgtcgaatgtatttgccgatgagggaatgtggttgttgggaaatctccgaaagaataaacagactgaccgggtaatgaaagaacttggtttgcagatgcctgtgaataaaatatatgatccgaagaaaccatgtctggcagatgctgttgtcagttttggaggcttctgttcaggagtggtggtttctgaagacggtctggtgtttactaatcatcattgtggctttagcagtattcagcaacattcttcagtggaacatgattatctgaaagatggcttctttgcacgtagtcttgaggaagaactgccgaatccggagttgtatgttcgtttcctgcttcgtacggaagatgttactaaacgtgtattgtctgccgcccggcatgctaaaacggaaacagaacgtcgtgtggctgttgattcgattatgaatgtaattagtatggaagtctccgaaaaggattctacattgactggtattgtagatgcttattatgcagggaatgaattctggctttctgtttatcgtgattataatgatgtccgcctggtttttgcacctccttcttctgtcgggaagttcggatgggatacggataattggatgtggccgcgtcatacgggcgatttcagcgtatttcgtatctatgctaatgccaagaatggtccggcggattattctcctgaaaacgtcccttatcatcccgaatatgtagcacccatttctttggatggatacaaagaaggttctttctgcatgacgcttggctatccgggcagtacggaacgttacctttcctcgtatggtatcgaagagatgatgaatggaatcaatcaggcaatgattgatgtacggggagtgaaacaaaccatctggaaacgagagatggaccgtcgtccggatattcgcattaagtatgcttcaaaatacgatgaaagctccaattattggaagaatagcatcggaacgaataaagccatcaagcatttgaaagtgttggaaaagaaacgggtggctgaagcagcgcttcgtaactggattcagtctcatccggaagagagagaaaaactgattcgtttattctcttctttagagttgagttatagtaatcgccgtgaaaccaatcgtgcgttggcttatttcggtgaatcgtttataaatggtcccgagttagtgcagctcgctcttgaaattctcaatttcgactttgaggcggaagagaagttggtgataacccgcatgaaaaagttactggagaagtatgataatctcgatctttccattgataaggaggtttttgctgccatgctcaaagagtatcagtcgaaagtggataaaaagtttctgcctgctatgtatgagaagatagatacgctctacaacgggaatattcagacctatgtagactctttgtatgcaacttccaatataacgtctcctaaaggcttaaaacgctttctggagcgagatactacttataatctcatagaggatccggctgtttccttaagtctggatttgattgtgaagtattatgagatgaatcaaagcatttccgaggcttccgagcagatagaggagggggagcgtttgttcaatgcagccatgcgccggatgtatgctgatcgtaatttttatccggatgccaactctaccatgcggcttagtttcggaacggttggaggatatactccttttgatggagccacttatgattactacacaaccgtgaaaggcatttttgagaaagtgaaggaacatgcgggtgatattgactttgccgttcagccggagttgttgagtttgctttcttccggtgatttcggaagatatgccaatgcgcagggagatatgaatgtttgttttatctccaacaatgacattacaggcggtaattccggcagtgccatgtttaatgccaaaggagaattactaggcttggcttttgatggcaactgggaagcaatgagcagtgatatcgtattcgaaccagatttgcagcgttgcattggggtagatgtgcggtatatgctctttatcatagaaaaatacggtaaggcagcccatcttattcaggaattaaaaatgggtcgatgaagtaaatattccgatgaaaccgcattttttatcgttttaatataataacgattacggcagcgataatcagtgcaatacctataccaatgcttgtggtgaaggcttccccgaaaagaaagatacctacacatacagcagttaccggctccatagctcccaacacagaggtgagtgtggagccgatgctttttacggctcttactagagcaagattagaaactacggtagggattaaagctaatagaatcaagttgccggcagtatgccattcgctgatgggttgaagctggctgatggtttccgttccgataaaaaggagaatacctccgaaaaggaatacgtagaaagtaagcagtagccccttcatctgtccaatttttagttggctcattgtgacgagataaagcgcatatccgagtgccgacagaagaacaatgaaaagtcccaggaaagaaaagcttcccgtttttgtatctccgccggataagaaataaactcctgccactgcggatgcaatggcagcgatccgccagccggacttcttttctttaaagaagagcatcatgattaacgtggtaagcaccggatacatgaaatgaatagtggtggcaactccgctagccataaacttatatccccagaacaggaatacggcagacattaaataaagaagcgcaagaagaaacagggaaggaatgtcctgcctcttgatgcgaaatgattgatcattcaccaataagattccgcctagcgccagacaggcaaacaggaaacgatagaaaagtatagactcaaattgcatccctgcttgcatggcaggaatggtaaatagagggataagtccaaaagaagccgatgaaagcagcccatatagtaaaccattaactttattcatagtcaagtatatattcgggccgcaaagatatagcttttttgaggcaagtagataaagcgtccatacaatatttttcgtaaattagcacgcgatgtaaatatggcatccgattgaaagaaaatacaaactaatttttggataaaatgaaacgattgacactattaccgggattactatttttaatgctgcaagcagcattttcacaagagtcgggcagctgtaaaccagtgaatctggtttgtgattatttggtgaatcccttgggaatagataatcctgctccccggttatcatggatgctgaatgatgctcgaaaaggagcacggcaaacagcctgtcaagtcatcgtagacaaagactctcttgaattgattgcagggaaaggaactatctgggattcgggcaaaaaggactccgaacagattctgattacctattccggacaggaacttcgtccttttaccaagtattattggagagtgaatgtatgggataaggatggagtgaaatcttcttcggatattaatagtttcgaaacgggcatgatggggatggaacactggcaaggggcttggattagcgataacaaagatattaattaccgtcctgctccctatttccggaaagtgtttgatgcacgaaagaagatacggtcggcaagggcatatattgccgtagcaggtttgtatgaactgtatatcaatggtgagaagattggaaaccaccggctggacccgctatatacccggtttgacaggcgtaatttctacgttacttatgatattacttcccaaatacagaaagggaaaaatgcgattggtgtgttgctgggcaatggatggtataatcatcagtcaatggccgtgtgggactttcattgtgcaccttggcgtaaccgtcctgctttctgtatggatgtgcggattacttatgaggatggttccgttgaagtcgtttctacggagcgggactggaaaacttcatccggcgcattgatctttaatagcatttatacagccgagcattacgacgcccgtttggaacagaaaggctggaataccgtgaactttgacgattctaaatggaatggagtaggatatagggctgttccttcacagaatgtggtgtcacaacaagtgcagccgattcgtgcagtagaaacgatccccgtaaaaacctggaagaaacttaatgacacaacgtatgtattcgattttgcccgcaatatggcaggaatcacccgcattaaagtgtccggggaagagggaactgtagtgagactgaaacatggtgagcggttgtatgacaacggacgagtgaatacgtcaaatattgatgtgtatcaccgcccggtagacaactccgatccttttcaaacggacatcctcgttttgagtggaaagggagaggatgaatttatggcacgattcaattataaaggtttcagatacgtggaagtaacaagcactaacccccttgtattgaatgagaatagtctgactgcctactttgtgcatagtgatgttccgcagaaagggacgattcatacttcgaacgcacttatcaaccgtctttggtgggcaacaaataatgcctatttgtccaacttgatggggtatcctaccgactgcccccagcgtgaaaagaacggatggacaggcgacggtcattttgctattgaaacggcattatacaattatgacggtatcactgtttatgagaaatggcttgccgaccatagagacgagcaacagcccaatggtgtacttcccgatataattcctacaggaggctggggatatggcacggataatggactggattggacaagcactatcgctattattccatggaacatttatatgttttatggcgatcataaactgttggcagactgttatgaaaatataaggcggtatgtagactatgtggatcgcaccagtccgaccggattgacctcatgggggaagaggagactgggtgcctgttaaatcacattcttccaaggaactgacctcttctgtctatttctatgtggacaccaaaatacttgccaatgccgcaaagatgtttaataaaacggaagactataaatattattctgctcttgccaataagataaagaacgtgattaatgacaagtttctgaatagagaaacgggcatttatggtagcggcgttcagacggaacagagcgttcctttgcaatggggcattgttcccgaagagttgaagagaaaagtagcccggaatctggcaaaacaggtggaagcagccggctttcatttggatgtaggtgtgttgggagcaaaagctatattgaatgcgttaagtgagaacggtgaagccgaaacggcttataaattagctgcacaagacacttatccatcatggggttgctggattgccaatggtgctaccacattactggagaactgggatttgaatgccacacgtgacatatcagacaatcacatgatgttcggagaaattggagggtggttttataaaggattgggtggaatcttccctgaccccgaaaatcccggattcaaacatattctccttcggcctaatttccccagtggattaaatgagctcgaagccagatatcaatcaccttatggggaaatctgctctaaatgggaacgtaaaaagaaccgtattgtctatcatgtaactgttccggcaaatagcactgctaccttttatgcacccgacaatgtgaaaggagagcgtgcagtaaatttggaagcaggaaaacatatcttggaattacctataaagagagctgtttattgaatgtctttcgattggtaatcccggttgctgtttacccagatgtaaaaaacagcttctacaccattgaaacggatgaatatatctctccccttccatgaatcgggcagagtgaaatccctccgatagctacctaccggattgggcatggaagcgaaagtgtaatctgccggacgaggctggatgacattgggccactgcactcctttgctataatctcagaatggatagatcacgttacaatagagaggtttgtcccaatttcgtgcttttgtatagctgctttataactaatagatggagtgttttgaaataagaacttgacaaacgactttttattttgtatctttgtgatcagaaaagaaacttattgattggaaattatgtgtatgaatagtataatattagaacagagttgccgacgatttacctctctttagaagaagaggaaatttattatatactaaaggttgcagacttttgatgagtttgcaaccttttttgttgtataaaattgaattgtttgcagtagatatacttcttatcgtttttaataaataggaataccgtttattaaaaacgataagaaagtttattagaaacacaaaagtagattctgtatgaacagttgtcttttttcaataagatagaatagggataatgttgttccttctcattagaatgtcaagatggtaattagttgtaacataaagatctctgactaataatgtacaaatctacggattatgcttgcttcatatttatttcttcttaggttttctgcgagcccatccttcttcactgaaatccggctctttatctttaaaaaactcttgccagtcatctttttttttcggaccgcgagcatcagagtatcctcgatcagcacggctaggcttatctttttttgttgactttgagtcttttgcagaagcatctttcggttttctatccttattctcatagcgcggtgcacgttcgtcgcttttgccgccgaatcgtttatttcccttgcgctcatttgaaccgtttccacgtccttttccgctttcttcaccggcgccggcaatctcaacaactaccttgcgtccgttccatttagccctattcagcgccttgattacatttgtcgcttccttttccggtacctcaaagaaagaatagttctgcattaggtcaatgcgtcccaactcgatacgtccccgtgtgttgctgttcaataagccgataaggtcgctggggaagaaactgtctgttttacccaaattgataaacaggcggttaaagcccggtgcagcttggcggcttcttttttcgaaaccaccttctttgcggtcaccccgtccggtacgttctcctctgatgtcagtcggtacttctatttctgcacggttgcgataatactcggcgaaacggttgaattcgtgagaaaccattcgtttaatcaggtcctctttgctcaaccattccagtttacggtagatttccggcataaagtcagcaatctcttcctcgtttacttttactttttcgagatcatcaataaccttaatcagctgcttctgacagattcctgctgctgttggcatttctccgacaatgaattttttgctgataatccgttcgatatctctcatctttcctttttcacgaagattgatgatggctatggaagttcctgtctttccggcacgtcctgtacgtccgctgcgatgtgtataactctctgtatcgtctggtaatccgtaattgataacatgtgtcagatcgtctacatcaagtccgcgggcagccacgtcagttgccacgagcagttgcaaattgcggatgcggaatttctgcataacagcatcccgttgtgcttgagaaagttcaccatgcaaagaatcggcattgtagccttcttgcattaatttgtcggcaatttcttgagtttctttacgggtacggcagaaaataataccgtatatttgtgggtagtaatcgacgatacgctttaaagcttcgtatttgtccttagcctgtacggtataaacaacgtgtttaacgttgttggtgctttcattcttgcggccaatagtgatttctttcgcattgcgtaggtaatttttggaaatgcgtgcgatttccggactcattgttgcggaaaacaatagggtgttgcgctcctgcggtacatcagccagaatggcgttgatgctttctgtgaatcccatattaagcatttcgtcggcttcatccattaccacattgtggatggtagatagagatacggttttgcgctccatcaggtccagcaggcgtccgggggtagctacaatgatgtgtacccctcgtttgaggctgcgtatctggctgtcaatggaagaaccaccatatacaggtaatacttttagtccgtcaatgtatttggaatagtcattcaaatctcctgctatctggagacaaagctcgcgggtagggcagaggataagcgattgtggaattctgttttttacgtcaatctgttggagcaagggcaaaccgaatgcggctgttttacctgttcctgtctgtgcaagagctactacatcattattttctcctaaaaggtacggaatcacttcttcttgtaccggcatgggattctcgtatcccatttcttcaattgctctacgtatctccggagaaacgccaagctcttcaaatgtcttcattaaatctctgtatatcttttatttcggctgcaaagatagttaatttagttgataatgaatgattgatagtagataattattatagacgccaccctattttatcacttatcaactattaattatcagttaataagatgctgcgtaactgttcaatttcttctgcagaaagtccgattccctttttcagataggtctgtacgctcccgtattcagcctcaatctgttctttggcagcgttcaggaaatcttcttttgcagagtagatggttgtaatggcttcttgcgaattgaccgataacttatatgcatattgagaagctttgggaatattaaaatagtcattactcaaacgatagtcttccataatgacgtcttcgttgactccaagagcggcaagcaataaggcggaaacgacccctgtacgccctttcccggatgtacaatgaatcacaaccggataatgagtacggtcgagaaggacggtgaacagctttttgaattccttttggtagtttataactaattcccgattcatttgttctaccaaacgataaatagtgtcactttttatcttctcttcctgaattccttgcagaatttcttccatgttccctgtgagaatagggatatgtatgatattaaattcatcatcatgcaattgcgggtagttgtggcgttcattttcagaacgtaagtctatgattgtccgtatccccatattcttaagttcctggcgtgagcagggaggaatgctgtctatttgtgcggaacggtatatcattccccagcgaagagatttgccagtaccggcagattcatatcctcctaaatcacggaaattctgtatgccggggatattaatgttgcgggtagccactttgattcggtatttgttattaaataccatcaagtagtaatagcgttgggacggatcattggttacgatggtcattttaccactggaaatgttggttattgcaatgggagaattttccggaatagtttcaggagaagtggaagtgtatacttttacctgcccttttaatattggtgctgtttcccatttgataatacagtttcctacgttgttttcttcacataccacagatatagcaggtgatgtgccggaacatgatgggagcactaataaaacagtaagccagcttaacaggtttttatacatagtttctttgccttgaatcgtatactgcaaagataagaattacccgaagatgtggtaattcctttgcgataattagccaaagttaatagtaatttacgtgttaaaaaagggcacatcttctgatggaagagtgccctgaatgaaaaattgtataaatcagctttattagatgctgttcaataaatcagtttttccttcatttattaactttaaaattagttcgccgaacaaggtattttgccatgcaaaccaagcacgggtgaagttattgggatcatctttgtgaaaagattcatgcataaagcctgtccctgcgtctgtgttgattagcatttttacacactccttgatctcctggtcgtcctgactggtaaatgctttcatcatgatactcataggccataccatgtcatagccgatgtgaggaccaccaattccttctcctgcttttcctttgaagaaataaggattatccttgctccatacaaaacggcgtgtattctgatagataggatcgttaatatctacatcgccaagataaggcattgccaataaacttggtacattagcatcatccattaaaaaatgatttccgaaaccatctacctcaaaagcataaattgtaccatatttagggtgattgtaagttgcatatttttttagtgcagtctctacttcttttgccagatctgtacattgttttgccatttctgcattttgatttacagtattcagaatttcagcagctttctttaacgaagaaacagcaaagaaattagacggcacgagaaattgcaaggttgtagcatcgtcagatggacggaaggctgaaacaattagtccgacaggattcacaggagcacctaaaccgttgttgtttaatgtatcgagtgcacgttccgttttgcgttgaaatttataaggtcctactccctccttacgttgttgctccttaaaagtagacaggatgttggtgatggcttgtatccattcactatcaaaaatactggcatcaccggtctctttccaatattggtaggccagacgtagtgggtaacatagagaatctatttcccattttctttcatgtaattcaggtttcatgtcggtcaggtcggacatccattctcctcccacagctccgtcattgaaagcattggcgtacggatcaatattaatacatttaaattgtctgcggatcactccttcgagcattttcttcaattccggatctttactggccagttgtatataaggccaaacctgtgctccggagtcacgtagccacatggcatgaatatcacctgtataaacaaaagtatcaggtttgccatttgttgtgcgataatggactgtcgtttcgagggtatttggaaaacaattctcgaacatccatgccaatttttgattagtaagtaactttttcaccctgatgatttctgcttccacggcttttgatgtaaaaagacgcttgtttacgggtggacgattacttttataagcggcaatttcagctgcttgattaaccacattggtatgatccttagctaggataagttctgtagctttagcatggcctcccattaatagggtagttgtgataatgcatattccgatgtttcttttcttcatatctctattgttttaagagggttattaaaagtgattattgcaaatcgattccgcctagtcttccatacatttctatgaaagcagcttgtgtcaagagccattttttctcgtttttatccgtgccactccaatctgtatggaacagtccccgttcatctctggcatgatgccatgcgtaatcaagacttttctggaaatcggttagataggtcttgttatggtctatttgataaagttcaataaagcctctaagcataactgctgtgaaccagatatttccttttttcagtaattgaaatgtttgcccgtttggagaggtaaaatgagtgaaaaagtgtttatgacatgcttctgctatattttgagcatcttccagataatttctctgttttgtaatttggtagagtagggcagctgcttgcatcatttgcccgctgttgtaggcaaatttggcacgaccgattttcttattgagtgcgatgttgtcaaagtatagatgatcctttggatcttccaggttctttttagtccactcgtataagtcttttccttgttttaaataggcgtcatcttgagtagcctgaaatagcttgagagcgaatacggctcccggcgcattagaacaagtatttttagattccttcttttgttcgcaccagtagattcctccgccaagtacgtcatctttaccactaaggataaacttccatattagtttagctttctccagataagcttgttttcctgtcatacgataagaatcggtaaaatcgatacctaaccagacgttgtcatcataaaaacgatcggagagaggttgactgctgatataagatgagtaagcgaatggttctcttcgtgtgtcgaagtattcttccaatcctggtagtactttgttttccagaagctttttatacttcttatttccagtgctctccagtaatgcatttactgcagagaatgtgcccgaatacggccaaaggtaggaatattcattgcgtctttttgcttgttcttctgatgccagataagttgccttattgtcttggttaaaaggatagttctcacgtaacagacacgtgttgggtgctgcatagttttggtaaagagcatccaaagtttgctgtgctttttctatgttaggatttgcgtttgcaatggtgaaagcacaaataacattaagtaataggccgttcataattttttatttaagtggtgtttatataaatagtaatttgaatgagttcgcaggttttattgtgactctacaaaaataccttatttcggttactttttaaatggggagtgagcagattgtaaatgattgtttggggtatgttgttgataatcagagaatttttgataggagagtctctgataaatgtaaatgatgctgtatgattaatacactgttattcccggatttgttgtccgattcgagctactttttcttcaaattcattccggtctccatttgctttgatccgcatttttgagcggtaattatagatggtcgataatgagtactgtaagaaatgagctattttcacactgtctgtaattcccagtcggataagtgcgaagatccgtaactcgggtgttaagagtttgccgggtcctggaatgattgcattttccggtaaaagcaatgcgttaaaatcttcgacgaaattcggaaagagattcaggattgctttgtcgaagttattataaaattcagccagatcttcttctgtattgagagaggagtggaggaaagaggttactttctttatatcttcacttttggctattttgagtgctcttttcttaaaattggcaattttactgatataactggtatattgttccatatacagccctacatattcttctttgattttattgttatctgccaatattgagttcatttgttgtatttcgtaaagatgataagacaaactctcattagcttgttccactttacctttttgttttttcagttgtacggacaggatgaatagcagaatgcagacaatgcataatgcaatgagcaatgccgttatgatgataaatttatgtttctccttttcttgaaatgccttatctatgaaaagatacatatctgaggcttcgatggtgttaattctcgcattgcataggatagcgtcctccattgcatttttcatatatttagatgcccggtctatgtccccactctcaaagatcagcttggctaatatttttaaagagaggttttctctagctccatttaatacatcagaaatggcggatattgcgaaatacttaatcgtattctcacgatcatttttaccttgataggcagatgccagagaatatgctatgattccggcatttcttgaatagggtgtataactttgataagtgctgtccagtatatgaatagcatcatcatactttttatggaaaagaagagttggtgcggtcataaaagctcgtacattcgttgggatttctttgcattggagcagcgaatcgcgatagatttgtgctatcagatcattttcttgtgaatcgtcctcgttggaagcaaaagctttctggtgattgtagatcgtgacctgtccaagaaaatattcggctttgagtctaggagatagttgctcttgttgcatcgaattggtaatcgccagagcttctttgaaaaagcccatcgaagataatattcttgaataatccagtttagcttcaattaaaagttctttgtcattactttcttgagcgaacctgttcatgtggatggcataggctaaagcggaatctttttggaaagatgaatactcaaaacaaagagactgtgctgtcccaactttctttcgaatatccctggattgtcttaatattattttcaggctgtctatctgtctttgcttttgttgggtataactagctttgttttgtagagatttatctaatacttttaacaatgtttttacttcatcgtttgcttttgctggtaaactgatgaagataaagattatcaatagaggtaaaataaatcttttcatatattaagtaagattgcttattgaatatggttgtttgcaaagataaggaaatccatattaagttaaggttgacagattaacttaatatggattttatgaaaatagggatttcgctggatgaattacttatatccaaatccttatttgtaatatcacttgtatttttgtgcaaactccaccgaaaccgaattgctgaaacttcggcaaacttcagctgcgaagtctttcccgcattggattattttatcccagatctcttcattcaagttatttagatcgcggtatcggacatcgtatttgagtaatccgtagatcagccctgcattgaagttatcaccagctccaatagtactgactgcttgtaatggttctatcggataatctttattgaccagattagtgcgtaacgctaccttttccgcacctgcagtacagatgaaccggggacagtagaatttgattttatccttgtaaatcttgtctatatcctgcatgccatacatatatagaaaatcctctaaagaaccgcgtacaatatccgcatattccagattttcaataatggtcggagccagtttcatggcttcattcttgtgtgaagaacggaaattcgggtcataatagatgatggctttcttttcacgtgcctgatctagtaattcgagaatcttctccctcagaaccggattcagtgcgtaataagaacccaccatgacaatgtcgtcttcctctagtttcggaaacagaacatccagacgttgcttcgggtagtctttgtagaagatatattcagcatcactctgctcgttcaggaaagctaaggatacgggcgattttccatccgggaatacatttacatgatcggttgggatatgattctcacgcataaactgcaggataatattgcctacacggtcattcccggtttcactgatgaagccgacatttattcccattcgtcccaatgagacaataccgttgaatacagagcctcccggtacggctgcggaaggctggtcacctcgaaagatgatatcgaggatggtctctccgataccgattacttttcgcatagtgatcttgatttttctcccagataaccgccgtggtgacgttttgaatattcagcgatagtaaatcctgtttccttcatggtttgtactaccaatatatctccgatcactgtcatggcagtagtggatgtagtaggagtcatccctaacacacagacttctgcaggcttgccggtacttagacagacatccgattcttttgccagcggactatccggatttccggtgataacgataaacttcagatccgggtccagattatgggctaagcgggttaattccacaatctcacgtgtcttgccagagttagagatcagcaggagtagatcgtttttttgtaagatacccaaatccccgtgttgcgcctcgctgggatgcagaaagacggatggaataccggtggaacagaaagtagtagcaatgttcatagcaatctgcccggcttttcccataccggaagttaccagttttccctttttctgatgtatttgttctacaatcagtttcaccgctttttcataagcgtctgttacggggatgttgagcacagcttgtgcttcctgttgcaaaagttgtttgatggagtctatcatataggatcagtttattttttcttttaattcatttaatgtgtttgctacttcgtaataggttgagaaaggctgtcgtgcaaaacctttgtcctccagggtgtggagcgcttttaatagctcgtcgtaaaaaccatgttcattgtagaaaatgaccttcttttggtgatatccgatagaggcagcggctattacgtggaaaatctcatcaagagtaccgacgcctccggggagtgcaaccaatacctccgacttctccgttatgatatctttgcggtcactcaagttacgggtatgaatttcttcatctaacagagtgcttaccttgccattctcttccagtttggcaggaactactccaataaccttaccaccattttctttcacggcacgagctatgcattccattaatccgaggctggctcctccatatatcaaggttttgcctgtctgccccatccatttgcctatttggctggtgctttcgaagtacattttgtcaatgttatcggaggcggaacagaatattcctatcttttccatatacgttgttgctgttatagtccacaaatatctgcaattttctataaacagcaataagttttattgtatttttgtggcattaattcaataaggaagtataaaacgatgcaaggtaacgaatatacattgccaaatggcctgcgtattatccatgaaccaaccctctcaaaagtagcttattgtggttttgcgattgatgccggaactcgtgatgaagcggagaatgagcagggaatggcccattttgtagaacatctgatttttaagggaacggagaagcggaaagcctggcatatcctcaaccggatggagaatgtaggtggtgacctgaatgcctacacaaataaggaagaaactgtcgtctatgccgctttcctgaaagaacatctggaacgtgcgcttgagttgttgggggatattgtatttcattcaacctttccgcagcatgagatagaaaaagaaacagaggtcattatcgatgaaatccagtcgtatgaagatactccgtcggaactgatatttgacgattttgaagacatgatcttccgcaatcatccattgggaagaaacattcttggtaagccggaacttctgcgaagttttcgcacggaagatgttctatcgtttacccgccgtttttaccaaccgggaaatatggtgttttttgttcaggggcagtacgagttcaagagaatcatccgcctggtagaaaaatacctgttggatattcctgatgtgaaggtagagaatcggcgtacacctccgcctctgtatgtgccggaacatttgacggtggctagagatacgcaccaggcacatgttatgatcggtagccgtggctataatgcgtatgatgacaagcgtactgcactctatctgctgaataatgtccttggaggtcccggaatgaatagtaaactgaatgtgtcccttcgcgaacgcagaggactggtctataatgtcgaatccaatctgacttcctatacggatacgggagctttctgtatttatttcgggacggatgtggatgacatggatacttgcctgaaattgacctataaggaattgaagcggatgcgcgatacaaagatgacttcttcccagttggcggcagcgaaaaagcagttgatcgggcaaatcggagtagcgtccgataactttgagaataatgcgttagggatggcgaaaacattccttcattatcataagtatgaatcatccgagcttgtttttaagcgtatagaagagctaacagcagagatgttgttggaagttgccaatgagatgtttgcagaggaatacttatctacgttgatttacaaataattgattgacagatttgctttcattgccagaattcgtatttttgtagcagatacgtatgtgataacaatctaatagtagaaattgtatgttggtgacgggcagaaaactccctatcgggattcagactttcgaagatatccgcaatgacggatacttgtatgtagataagaccgcattgatgtggactatggcaaacatcggtaaacctttttttttaagccgtccgcgccgattcggaaagagtttgttaatttctacgtttgaagcctatttcaagggacggcgtgaccttttcacgggacttgccgtggaacaattagaaaagaagtgggaagaatatcccgtactgcatctggatttgaatgccgagaaatatgattcaccggacagattggatgctattttaagtaaccagttaactcaatgggaagctatatatggcaggggagaagatgaaaccactttgtcttcccgcttcttgggtgtcattcgtcgtgcctccgaacaagcaggcaggggtgttgtagtcctggtggatgagtatgataagcccttactacaggctattcagaatgaaccgcttctcaattcttaccgttctactttgaaagctttctacggtgtgttgaagagtgcagaccgctatcttcgttttgcttttctgacaggtgtcaccaaattctcgcaagtaagtgtgtttagtgatctgaaccaattgaatgacatcagtctgaattatgacttctctactctttgtggaatcacccgcgaagaacttcttgctaattttgaaccggagattgcagctttatcgcaagcaaatgacatcaatacgaaagaagttgtggaaacaatgacccggcagtatgacggttatcattttcatcctaatggagaaggagtgttcaatccattcagtgttctgaatgcatttttcagtaaagagttcggtaattactggtttcagaccggaactcctactttccttgtggagttattgaaagagagcgattatgatcttcgcttgctgatggatggtatagagacagctgcttccgctttcactgaatatcgtgctgataggaaaaatcctattccattgatttatcagagtggttatctgactattaaagattatgacagagagtttagactttatcgtttaggctttcctaacgacgaagtacgttatggctttcttaacttttttactcccattttatacggcagtcacggatgaagaacgaagcttttatataggtaagtttgttcaagaactacgtacaggcaatgttgacgctttcatgcaccgctttgaagctttctttgcagattttccttacgagttgaatgaccagactgaacgtcattatcaagtcatcatatatttaatattcaaactgatgggacaattcacgcaggcagaagtacatagctcacggggacgtgcagatgcggttgtacgaaccccgaagttcatctatattttcgaattcaagctgaatgggactgttgagcaggccatggagcagattgaagaaaaaggttatgcttttccttatatggcagaggatcaacaagtgataaaagttggtgtagagtttagcgcagagaaacgaaatgtagagcgctggatggtagcgaaagaaatttaatataaaattgattatgaaaaacttaatacgaaatgtctgggtttgcttggggctgatggtgcttcccttcacagcctccggacaacaaaaggataacattacctatgtgccggctcaagagcttttattggtaggcaaagcaactaccgaaggcgaatacttccatcgggtagatacagccaagtatcgtacaatgcctcccacagtgaagaaactattcacaaactctgccggtctggctatctcttttacaacgaatagccccgtcataaaagccaaatggatggttcctgataattaccagttacccaatctgaccagagttgctcagaaaggtctggatttatatatcaaacgggatggaaaatggcaatttgccggagtagggataccgggtggtgtgactacggaaaaagtgcttgttgataatatgggtacggaagagaaagaatgtttgttatatctgcctttatatgatgaactgaaaagtctggaaataggtgtttcttctgatgcacacatacgtaaaggagaaaatccgttcaaagaaaagatagtggtatacgggtccagtattttgcagggagcatctgccagtcgtcccgggatggcttatccggctcgtttgtcccgtagcagcggatataattttatcaatttaggattgagcggaaacggcaagatggagaaagaagttgccgagatgttggcggatattgatgcggatgctttcattctcgattgtattcctaatccttctcccaaagagataaccgaccggactgttgattttgtaatgacgttgcaccagaagcatccggatacgcctattattgtgatacagacattgatacgtgaaacaggtaatttcaaccggaaagctcgtgagaatgtaaaacgacagaacgaggccatcgctgaacaggtagaagtattgcgaaagaagaatgtcaagaacctgtatttcataaaagaagatcaattcttgggaacagaccatgaggggactgtagatgggacccatccgaatgacttgggattcgaccgaatgttgaagaaatataaaccggctatcagtaagattctgaagatcaaattcaaggctgaataacaggaatgaaagattataacagagacagatagaaaaaataaaggtcaattcatgggggtgaattggcctttttcttttgcaaatgtgttaagttgctgttggtattttatagtttccttaaacctttatcttctaagtatttgattaattcttggggacgatcagtttgtatcatagttgccttatgttccagtatccatccccaatgcttatctttaccttctaatagggcgttttcgtcatcatgtccaccgcatagactatcccatagagtattcatccatacccggctaccagattgtacaattttatcaataacctttaaatttgaagtctgttcgtctttgaagcagagttcataggctattggcgtaaagtctttaataaaactttcggtcgcttttatatcttcttctttccataaatgaatgataggcatatagagcatactggtattggttccatattcctcttgaactttctcgacaggataccttccttttataatcacttgtttttccattccacattttcgaatgatgggaagaatctcctttatatatgttccgcctttatctatattgaccagaatacgatctttacatgtcattaacgcttcttctaaagtgggtatggatcggcgggtctttataccgtttccacttttcagcacaaattgttttagttctgttgtcgtatagtttttaatggcgccttttcctgttgaagtgcggtctagcgttgcgtcatgcatacaaataaagttgttgtctttggtttgctgaatgtcaagttccaccatgtctgctcccatagcgatggcattctctatacattgtatggagttctccggagcattcctccagtcgccacggtgagctataacaaatacatattgagaattcttgtcgtgaagattcctcaatagtttatcaattctggattctgcttcagcagataatgaaaccagaagaactgataatagaaatataattttccttgtcatacgtgcttttcttaaataaaatgttttgatctatattgggtacctatgaaaaactatcctataaagttatcttaatcctttttcttttaaataagagttgacaagatcagagtaatcagtttgcacaacttctattttgttatctataaaagtttgaaggtgcgaatatttactattcagtagatcgctatcccaatctaaatgattggcataacctactaacttggcatctttaatagctcccattagttcagtgagagatgcattgtctattccgaattgtaccatttgtactttactgtaatatttggcgaggacttttacttctgccgcagtggatacccatggaaaaggaatggctccagggttaatagtattcatttcttcaatatatgatgtactggaaccagtataatagcaaacctggtcgatcatccctttttctgcaaccgttttaatgattttacctaaaagccccttctcttttacatcgacacaaacatagattttgtcttttgcagcatccaatacttcctcaagtgtaggcactttgtattcagtgatacctttagaaccttttaaaaaatattgataaagagtttgataagtcatattggctacagcaccagttccgtttgttgtagcattaatggttgtattgtgcatatttacgattactccgtcagaagtagctctagggtctatttcaatcatatcggcaccgacttctattgcatattggatagcgggaatagaattttcaggaattccgtcacgtattcccttataggtgttgctacgatgagcgcaagtccacattttcagacttgtgttgctggaaagattctttaagtcggttgttaaacttttagtgtcaggttcttcacctgggtcctccgggtcttcattatcatccggaggagtcggctgatttttgttttcatattcatcattggaagagccgcaactggtacacatcacttgcccggatacaagtaagatgattgccaaaagaaaaaatactttcttcatagtctttttattttatttattagataatgtaggataggctatcgaaataacctatcctgtttgatttgaattattttactgtagcagtgtgttgagcgtcttttgcacgcatcggccagcctgttgttggtaatcctttcacatatttggatgacagggccactaataaacttttcgattcatcttgagtgttagtaatggccacatagatagtcccgtctgcatccactaccggtgaactccagaatttgccttgtgttgcagcccattcggatgcataagcactttcgctgttagcaattgctccggccacatcaagtacggcaatagcgtcagtaccatttgcgtcaaggatatagaaattaccacgttccgtaccgaacaagatatgtccatccttatcaataacaggagtactgctgacactttctgatatctcatattgccatttgatagttccacctgctgacaatgcaacaattccgccaggcatatctccctgacttttcaatgaggcatatacagtgccatctgtgccgataacgactcctccctgatcttgtttgccagtattctcaataggggtagtccaacgtacactaccgtcactggcaacggaatagatggtagtagtcagatcagatgtataaatcatgccatatacatttccttcattgtctatggccattgatgcatgacagccgctgttcaaaccactgtcaaatgctctccatgcccatgggctgaaagtattgtcgtctttagccatagtagcttttgctacaccaaacattccgtagttggtacacatgatatacatcattccttgtttggagataacaggacctgcataaacacctccggcaggaccgctggtaccatctgcgttagttaaatagctaacacggtttcctgttgttttgtctactgcgatcattgaaccggtgcttcccccattaccacagtatacatatttatcatcaaatgctggtgacacgctacgcattttggcattggcggcgttacctttattccagaaaccggtagtcggatcattgaaagtaatccatttcttatttccatcaggattgatagcaaatagtttaccattgcttccgtcacctgtgccaatgtagattgtaccatccgtatctacagacggtgtcatgtttgagcctcctgttgcctgcgctccccaagatggatcagtcatgtcgaatgaccatttttcaatacctgaagttacatcataactatgtaatatgtggtcattactattgatgtaaaccgttttttcatcaggagaaagagcggcggaattggaaactaacttggctaaatgagtggaggaggtccatagtaatgtaaggtctcctttttctactactttatcggtaatttcaattgttttccggtagaggttcgatcttccactgctgtcggttatggtcaaactaacaacaaatatacctttctcattgtacacgtgcttcgggctttcttcggtagaagtcgttccgtccccgaaatcccatacataagtaaagttgccactacctccataagatgcgttagtgaattgtatttcaccttctatttgccctctttcgggagcgattgagaaagttgcggaaggaatatctttcccggcattgtcttcgttgctgcatgcggcaaataataaaagacaaacaatatatatgaacggacatatccgtactttatttttaatagttgtcatacacataataatcatttaaggttttgttattaatttcctgtatatcccgcatatccgggattttgtgggtaggctgccgtaccggccatgtcaatctcatcttgagggatcggataatacatcagataagtacgaccatcgagtgtttctagcaattctaagcgatttgtacgtttgatgtcctgccagcgcatgccttcagcataaaattcacgacggcgttcgtccaagatcaatgtctgatattctttgtccgatagagctttgattgctgcttcacttggagcggtagtatatctttttttcatatattccactaatgcggcggctccgttcgtttttccgagagcttcggcttttatcagatacatttctgaaatacgggagattactaccggtgtgcaggtataatctgacgtttccgccaattgataagttccattcggatatttgattacgcggttggcatcttggctggtgaatgtggcttttaaccgtacgtctcctttgcgtgaaagagtattatcatcagcaaaaagactattataacaccaatcagatggagcataattccatgaaccgtccgtgtcattaacgtataatgtgaagtttagaggactggatgctcttgaattattaacataggcaaatataatttccggacttgaacttcctgcaacccaatttttagagaaatccatagcggtggatgcgagcgagaaactggaattagctaatactgcttctgcatagtttgcagcatccgtcatcttgttctggaaaagagctacacgtgcagcaagtgcatttgctgcgtcagaagatacgtaccatttggaatctgcttttgacagtaagcggatagctttacccaaatcctcttcgatgaatgtccatacttcagcttccggagagataggaaccacctcttttgaacgtttacgcaggatagggacatttccataatgagaggccagacgataataaataaatgcacggaaatagtaagagacaccacctacttttttcatgagagcactttctttattttcggaagcttcataagtttctacgagaaaattgacctggtgcaatgttgtaaatgagtttctccaaaaggagagaatgttaattgcctgattggtatacgagggagacatttcgcatgggtctgtaatttgacctcctccaggacctgctttgaaattttccccttgtatatcatccaaccaccagaaagtgaatgtataattttccatagtggcgtatactccatttaatagcttttcgagatcatcatccgtcaaggctgattgaggaattgcatgtcgggggctgatgtcgtccagccagtcagaacagctcgtggcgagtacagttatggtcattaaaaccagagtgaataatagttttatatttttcatatcgttagttttagaagttaatgcttgcacctatgataaaactctttaatgtggcttgttctccgaaatctgctccgtagctgttgcctgtcggattactttcgtatgagaattccggatcatatccggaatatttggtcagtgtaaaaaagttgtcgagagaaacaaagatgcgagctcccgttacgtgtatttttgacaacagagaatgaggaaggctatatcccaatgtgatggttttgaatttgaaataagaagcatcttccagatagcgggtagaaacaagattgtttccgaaaccgccggtgaacgtgcctgccaaagtagggcgtggaacagtgttgctagttccttctcccctccagtaatggttggcggcatattttgatatgttatagaattgttccgaatcgaccagtgtgccatttttgtaacctttgatactgctggacgccaagccgagatgttccgtaccttctgttcccccgcagcctttccatgctgacaggattttacctccggctgcaaattggcagaaaatggataagtcgaagtttttccagttcatagtcgaagtgataccaccataaatgtcaggtgtaacctttcctacatacatgcggtcatcgtctgtgatgtctccgtcattgttgtagtcaaagtacttacaatcaccggcacgtactccttttgcgtagagtttgcttggtacttcctggtcggtttgataaataccatcctgacgcaacatatagaaagcactaaccggtttacctaccattaaagcatgcattactttaccggtattggcaccaccaccgttgattttcatatcaagtactccatccaatgacaatagtttgttttttgtataggagaggttagtagcaagctcccatttaaaaggaccatcgaatattttaccgctcaccatcacttccaatcctttgttctccagcgagccgatattggctgtccgggtagtatatcctgttgtagcaagtgtactgatattataaagtaatccgcttgtcttttgatagtatccgtctacagatagcgccagtcgtccgttgaatagctctgcgttgattccgacattcacctgattagctttctcccagataagatccgcagcatctgctccgattttaaaaccggatgaaccattataggaatttcctcccgaagttactaatgacatagctgcccagttactgataccatccatactgccagtcttaccccaactggctcgtagctttaagtcattcagtggcgtacctttagggaaaaatggttcgttgataatccgccacgcgaaagaagcagaaggaaatgttccataacgtttatcttttgaaaaacgtgaagaaccgtcacgacgcatcgttacatttaagatatagcgattatcccaattcagggcggcacgtccgaaataagattcgagtgcatatgcattatatccgatactacctgcgtagatgttagaaccggaatttatcagaccgaagctggaagaaggataagcaccgtttgcgtaattatcactataagccccaaaagtttcatagttatactcttcgtatgagtgaccaagcatggctgaataagttagtttatcccaactattttcatacgaaattacgttgtctataacatatcggtaacttacatttttctgttcgctaagtgcaccccatcctgcatttttggaacgtgcgtcatgtttctctgaaattgttttcttttcttcatcaagaataccgtatatgctgaatgagggggtgtatttgagtcctttgataggagttatatcaaaactaagggcagctactccttgtttcttatgtacagtccagtcttcttcattaatcagcataacgggattatgacgacataattctgttgacatcactgtatagcctccatcttcccgataagctccaatccatggttgttcttcacgggcagtacgaatcactttcaaactggtagatgactcttccactttatcgaaacggctgtaagatcctgtgagattcagattcagtttaaaccatttgttcagctgatgagtaaattttgcccgtaggttggtttgctggaatccgctggtgcggatgataccttgttggtcgttaaatcccacagaggtgaaaaaggtagttttctcattacctcccgagagattgatagatgccgtagtagagtgtgctatatcacgttgaatgagtccgagccagtctgtttcggtaatccggtcggggatgaagaatgattttgtgtccttcttctgcacattccaattatctacggctgcttgcatagtacgagtatattctgctacatttgccattggtatatcgttggcaatccatccaaggctgtggcgtacactggcatttacgcgtgttttactgttggtgttccccgattttgtggtgatgatgacaacaccgttgttagctcgcgaaccatagatggcagcagctgaagcatctttcaatacgtccatgcgttcgatgtcgttggggtttagcataggcattgattcactgggaactccatcgaccacatacaatggggtgctgttacctgtgatggatgcaataccgcgtacccgtacactcggttgttcaccgggggtaccgctggcagaggctacatttacaccaggagtacgaccttgcagcatcttggctacattgtagtcactgccttgatccagatcatccactttcaggctactgatagaagtggttactagtttttcggactgggagccatagccgactacaactatctcatttaatgcaatgctgctttctttcaaatatattttcagattgtttttattgccggctttcacttgttgtgagtcaaatccaatataagatactgttagtggttggttaggatctgctacaatggtaaagtttccgttaatatctgtaatgactccggttccttttccttgcatgacattggcgccaataataggaattccactttcatctagtacggttcctttaatcgctctcttttcattacttctttgttctgtctcctgctttaccaatacgatggtgttgttagtaaatgaataagatatattcaaaggagtaaatacctgtgagagcacttcgctgataggtttctttgtgcagctaattgtcactttagtctgatcgttaagaacatgattccggtatacaaaagtatatctcgtttgctgttctacttgtttcatgaaagtttttaccgtgccatttttgatatgaatggacacatttccttcttgggcaaacactcccgaagggaataaaattatagcagcggataaaatggtaaagtttctaaaaataaggctgttccgcagtttccttctcaataaaaatgttaactttgtgatattcatagttgataatgttttgatgtataaaattttatcgacttccatacaaccaaaggattgggcgattctttggttgttcttttttgattttaactactgtgtgttttccataagctcctttcttttaaattagtaaatagttattatatctttatgtatctcgtacttaaatccgtattgtatgcttaaggatcttatgacattctgtatactttcgtttcggaaagatcccgatagtaaatcttgtgcgatttgcttatgatgcaatctgatttccaccccataccatcgttctatctgggctattacatcaattaatggtgtggattcaaagatgaggtaattatctctccatccggcttcaacatgggcatccgctttgcttattcgtagtgttctgtccatagcggaataggttgccttttgtccgggtgaaagcgtatattcatggggaagtgaaccacctgatattctgattcgtccgctaagtaaagatgtttctacaatgtcttttttataggtctttacattgaatgaagttcctactacttcaatttgcagatcgttgattattaccttgaatgggcaatcgggattcttggcaacatcgaaaaaggcttctcctgatagtttgacgaggcgttgcttggagttgtttacatcatattccaggtttgtagccgcatttagatgtacaaatgtaccatcagggagagccatttctgctttactgccagctctaactgttacagcaaccatttgactttccgggttattcatccatgtataaagtccaaaagaggatgataggatgatagcgataatggcagcatatttcatatattgcagccaacggcgtctccaaatgatttgttgtagttcctttcgaatttgctttttcatcataggaggcatctttatctctactgtgtcgttttccatatctatcatggtattccataactcttcgtcaggtatgttgttgagttcatttctgaactttccaatatcggaagaggtgattcctttttcgatgtactggcaatataactttttaaattgtggactcatattattggtgtttctataggttatacgtaaatacataaagggagtactagactttttttatgttgtagagcatagaaaaagttaggaatagtaggtgtttgtagagttttgtggagttttaattattcctactgaaagtgttattcttgttacaggaagaaaataaagagaatattatatttcatcatttcgctgcgaagaatcttcagggcggaagtcagatagtttttcaccgtttgttcggagagatccagttgttcggctatttgcttgatggggatatgtttctccctgcttaattcataaatctcgtgttcccgttgtgacagaactttcttcgattgttgaagttgttgcaggaattcgtcgtacaataagatatcttccggcgatacgtcagttgcctggttctcgcaatactccataaagtcttcgaattgcagttcgttgacttgtttgcggaaataatcgattacctgatgtttggcaatagtgaaaataaaggcttgcagattgccgaagctattcaactggttacggttgtcccataggcgtaaaaaggtatcctgaacaatatcctgtgtcagggaacgattttttagttgtttaagaacaaagctgtaaagtcggtcggcataggcttcataaatctgtgtaaaagcctggtaggagccgttgcgtagttcttttatgcactgtatttcgtctattttcatcctttctgcaatagaagtaggtcgggcaaatgtactgaaataatttagaaatcaacaaatctatgtgaataaataaagagaaaccgatgtccggtagttggcagatgaattttattttgcaatcatattacaatcatatattgagctttattgtgccgtctcttgctttccgctaattaattttgtatctttactgttttttgcccttgtaaagacaggtggtcaccttatgcagtgataaatatcaccttataaggtgacattaggctgtttacaaagtgactattgtcctgttacaatcggacaactacccgagtgcataaacaatgataaatctctgcactgaaaatctttattctctgcactgaaaaatcttaaatataacaataagattatggccttttacaatttaaagaagaagcctgccttgactactaaggaaggagaaacggaaacaatgtatgccgacattgtctacagtggaacgattccggcagaacgattgatccgtggcgttgctaagagaaccggatttaaggaaggagtgatagaaggtatcctgatggaactgaaagacgatgtattgcaatatctgggtgaaggataccgcgtcgaattgggagagttcggcttcttttcagccaaagtgaaagcttcccgattggtagcaaataagaatgatattcgttctgaatccgtagctttcaacggggtgaatttccgtgcttccaagagtatgcgtgtaggtattcgcggagatttggagcgtagaaagtgtgtcgatttcaacacttcgcgtaagtgggacagagacaatctgaagaaactcgtcctgcaatatatcggagagcatggcttcatcacaagagccacttatacgcaacttacaggacgcctgaagaatactgcattggacgatcttaaatcttttgcagccgaaggcattatcaagcgagagggacggggtaatcagatgcatttcattgcaccgccacgaaaggaaccggatggtgagtagtgaaatctaacggaatatcgatggaaaccttgtcgtacaagattggagattgagaacagaacagagaaatgaagaggtagtatctacccgaatggattgaatcagtgcaaaatgtggtataagtatgatgtatggctaaaaaaatacagtacctttggctgtgaatacaggtaaaacggtgatgaggtgtctatgaaacagccttacagtggatttctcgtccgaatgttgtttgaccgataacacagactataatatgttggatatcatatactacttcaatatcttcggttgtctgacgatggagatggctctgctgttgattcaaacagccccacagctgataaacccgcactaccgcaatgccaaacgattcctgggtattgcatcgattatcgtggctctgtgcaatgcgcttatcctttacaacagggtacaggagagcgttgccgaaatatttgcaatgcctgtgctcgttgcggcacagttgcaggcggcgctttttacttttatcgtgctgatactttttcattcaccatacgtttgccggcaaaatattttgcgacacctctgcccgacattgttttttgtgggactctatctattaacgatacttctatttcctgatgtgaggatctattcggtggatgagtatatagcgaatatcacgaatccggttcttttgttaagaactgtatttgcggctacttatctgacacagatcgtgatttacgtccgtttattccggcgtgagcaacggaattatatggccaagattgagaactatttctccgacaccgacaaatatgaattccggtgggcttcgagactgttctacgaggctgcctgcatcggtattgccgttctggtgttcagtatatttcctgccccgttattcgacggaataatcacggtggtgattacagtgtactactttgactttggagtgaggtatatcaactaccaatacaaactttactatgaggctttgcccgcgatagaggagaaggaagagtcgcagccggcaaaggagagtgaaggagacaaggaactggaagatgaaatggcaaaactattattgtatctccagcagggtgttgtgctgggcgactatgccgaggctctgcatatcccggaacggaaactatctgtattcatcaattcgacttacggggtgagtttcaaacgttgggtgaacaataaacgggtagaatacgccacagagcaaatggcgaaacatccggattatacaatggagaggattgccgagctttcgggttttgcccacaaaagtcatttctgtaaaatcttccgggagataacagggggatcctttaccgagtacaaaaatagataacacctccaaactgttgtatatttggcgatacagcttgttccaacatacaataaatccacaaaaaacacttgtgttgcacgtttcgacgtcagatatgcgtaaacgtgcaccaatcatccaaaattttcattatatttttgctgcgtagggcataaaccgctctgcgcttttttgttttcccatgaatattaatcaaatataaaacaacatgaaaaagatttgttctttgttagtgctatgtgcaacagtagtctttgcttcgtgcagcaaggacgatccggtaacggagcccgtgccggaaggtatcaccgtcaccacctacgacgccctgctcgacgccctgcagacgggcggcacctcggccgacgctccgacactcgtcacgctgggcggcaacatcacgatacccgcgggaggtgactataccacccctcccatgaacggcagaggccacttcaagatagacggcggcggccacaccatgacttgggaagacggcaacaactaccacttcctcggcaatttcagccccgatgccgatgccgtttatatcgaactcaccaatatcaatctggtccagcaagatataaaatctgcggtatgtgttatcaacggcaggattacgctgggcaaagacgtggcattgacaatgaatgggcaatatggagacatgattgtggctgtcggcgagaaagcggtattggaactgggtgagggcttcgaattgtcttgcacggcagtcagcagttcgtgctgtgtaatcgtccaggagggcgccaccctcgtgctgaacgggggaaagaccgctgccggggcttacatagacctaaactgcgatttttactcggccgcctcccatccccttatctccgttccgaaagccctcacgggtgatgtgcatctccttttcaccatgaccggtgtaacctccatcgcccaaggtgccggcggttaccaactgacgcaggcggactgcgaccgtctgaaagtgaatccggagtcaatggtcagcctctatggagagccgtttcagaagtacgccgacaacttcgagctttacctcgacccggcggcggaacatcaaatcaagctgcgccggaagaatttcacaccccccacttccggcaacatcgacatgacctccatgactgccgacgaagcgcagctaaccatccgtgccgccgtcgccgcaggcttcaccgacctcaagctgacgggcgaactttccaaaacaggaattggcggtaactggggtacatttatcaataataaaaaaattacgaaatgcgacctcaccggagtgacggactggggtacaacgccaactctgcccgaactcgcctttgcgaattgcaccgccttgcaggaggtgacgctgcccgatgatatgaaggtaatcggaactggtgctttttcaggttgcgctgcgctgactacggtgaatctttcgcaggttacctggattaatctaaacgcattctggggatgcacttcattggagacgctcgctttggataatgtgactgcgataggccaggaggctttctacggatgcacgggcctcgaaacgctcaaaataccgaagtgtacccagttcggcaattatatcgtaacgggctgcaaagctctcacccggatagaagccaccgcagccggagatttcgttagcataagtgatggtaccaccagtatagagcacaccgccgtttttcacaacagagacggtcataccggagataacgcattcgatcccgccaagtgcgacctcgtgctgaacgccgacaagcagtatggtggcactgccgtccccacagccacagcctacaacgaatggactgtgggggaaaacggttcccccatgaaatggaagagcgtcagcatcacgccaccgtaatccgcgcctttcccgaagttgaacttcgaggcggtctgatttattttgggaaatccaattttatgcctgatgcggtagacgacatatgttgtcgtaaaaagattatatcttaattagtagtcgattaaaaacgctctgccattggcagattacaaaatatatctccgcccaacttgcaaaaagggtccctactgtcaaattgcagggatccttttgctttatacaatttactccgcatgacttaggaaagctgtcctctgtcaaaaggaagattatcgaataacggagttttttttactgtcgaattgtataaaaaccggtcgtgagtttgtttcctgagagaattttgttacttttgtattcgaaagagttacttgaagatacaactctgcaaatcgctaaaatgcgcacagttaccaaattgttatctctcaattccccaaattatgcaaagtgtttattcttcaattggttatcttaaccgcgaataatctaaaataaaaaaacgatgtttcagaaacttgtagctatagagccggtcagtctggttccgtcggccgaaaaagcgttgtattcatttgccggtcaggtggtgatgtatcctgatatacccgcgaatgatgatgaaatcattgcccgtatcggagatgctgatgcggtgcttttgagttatacctcccgtatcaaccggtatgtacttgaatgttgtccgaatgtgaaatacattggaatgtgttgttcactctattctcccgagagtgccaatgtcgatattcgttatgccaatgaacgaggtatcacggtaacaggtattcgggattatggtgacgagggagtagtggaatatgtagtcagtgagttggtgcgctgtttgcacggctttggacaggaatcgtgggagcagttgcctcgtgagattaccggattgaaagtcggaatagtcggactgggtaagtctggcggcatgatagcggatgccttgaaattctttggtgctgatatttcatattatgcccgcagtgagaaagaagcagctactgccaaaggatatcgctttttgtcattggggaaactccttgtagagagtgaagtcatttgttgttgccttaataaaaatacgattctgttgcacgaagaggaatttaagcagatgggtaaccggaagatcttattcaataccggtttgtcgccggcatgggatgaggctgcttttactgaatggctggaaggtgataacctttgcttttgtgacacgataggcgcattggggggtgagcaactgctcaatcatccgcatgtacgttgtatgcaggtgtctactggccgcacgcgtcaggcgtttgaccgcctgagcgcaaaagtgttggccaatttgtcagaatacaatgggtgatgcgatattaatcagggtgctcactactgaccaccctgcaatatccgatgtagcactataaatgtctactacggcatgcacctgatcgtttttgatttctactctttgcgtatctcccacaaatccgggagtagactgtatggatacctgcatgttctccggaccgacagaagcccgtgaggcggcaactgtaacattcactttggttggaaagaggcgaatagcttccgcagcacttccggagaaaacagtacgttgctccgtttgcaaagaatcatcataaacgggagttcctttgagtgcgttaggacctttttcattgaagaagcgggccgtcgtatttcccatcagagaggcagttcttaaaacatcgaatccaccggtagctccggatgcgatatagattcgtgtgccatttaccttggcggtttctgccacttcccgatagaatgtctcgtctgccaaagcaccgatagacaaggtaatgacagacgttccgtttttcaatgccggcaaagccaattcccgcatagcggcaggagaggccgattccaccagataatctggttttaatgccaataactcttccaatgtggcgcaagcaatgcaaggcttgccatgttgctgcattttatgaacgatgtgcgctgcttttgatgccgtacgcgaatagacacctaccagattataatctggcaataagcctttgacaactgcatccgcaacgatttctgcaagtcgtccacatcctacaatgactaactttttcatgcaacaaagataatacttttattggtaagagcttcggttggtaatatggtatttattttcatcaggtatgtatccggggttgttcctttaatttatgaactatttgtaataagattacgaagattttctctacatttgtctttattaatcttgtaatcttctattaaagtttaatactccgatgaaaaaaaagtacctgatatttcttttacttctctcttttccattatatacccgggccgataagaccctggactcactgttgaatgtgcttgatttgacgattcaagaacatgagacgtatgtggttcaacgtgaatcacgtatcaagcatcttaaagaactgacacacggaatagaatctaattctgcggaacagtacaatctgaacagtcagatatacaaagaatataaagcctttatctgcgactctgcaattcactatttgaatgaaaatatccggattgcagagcgcttgcgtgatacggaccggaagatagaaagtcagttgcagctttcgctattattatcatcaactggaatgtataaagagtctcttgatgtgctggaatcggtagaccgtcggaaaatcattcctcgtttaatagccgattattacacctgctttgaccatgtgtatggcgagttgggcgtttatacacaggataaaaccctttcgggacgttattggagtatttcacaggcatatagagattcattatatgctatattgcctccggaatcggaagaatacctgctgatgcgtgaagcatcatttcgcgatcaacgccagtatgaggatgccctgaaagtgaatgatctccggttgacgaaaatagaaccatatactccccaatatgcgatggctacttatcatcgttctttgatttacaagtacagtaatgatagtctgggagagaaacggaatctttgtctttctgctatatcggatattcgttctgccattaaggaccatgcttcgttgtggatgcttgcccaattactttatgaagatggtgatatggaacgtgcataccaatatatgcgcttttcctggaatgcgacaaagttttataatgcccgtttgcgtagttggcagagtgctgacgtgctttcattgattgataaaacctatcaggcaatgattgaaaagcagaacgaccgtcttcaacagaacctgctgcttatcactgcactgttggtgttgttgattgtagctttgggatatatctaccgtcagatgaaaaagctggcagatgcaagaaatcatcttcaggtagctaataagcagttaaacggattgaatgaggagttgaggcagatgaatagttgcttgtcttctaccaatatcgaactctcggagtccaatcagatcaaggaagagtatattgcccgtttcatcaagttgtgttctacttatatcaaccgtttagacgcttaccggcggatggtgaataagaaagtgtctgccggacaaattgcggaattattaaagataacgcgttcccaagatgctcttgacgaagagctggaagaattgtatgcaaactttgatacagcctttttgcatctcttccctaactttgtgggaaaattcaatgacttattacaggaaaatgaacagattttaccgaagaaaggcgagttattgaatactgaactgcgcatctttgctttgatacgtctgggtattgaagatagttcacaaattgcggagtttcttcgttattcagtgaatacaatttataattatcgggcgaaagtaaggaataaagcccgtggatcgagagaggattttgacgatttagtgcgaaaaattcgctaattcggactgtaaaacaaccacttttttaggtatacgttctgaatgtaaatagatgaaaataagtggattatcgttttgtatgatccacttattgccccctccttgttagctcactttaatttctttatacttttgacctgtgcttcgaaagtaatgagagtagcccattgctgacgagcgtcttattattaactttaaaacttagtacgcatgaaaaaaaacaggcgaaaaatcctttcggggagtcgcaagattttctttgctatcttggcaatgtttttatctttgagtgcatccgcacagcaaattactgcatccggtcagatcctggatgctcaaaaagaaccgctaatcggtgttagtgtacaagagaaaggtacgtctaacggagcaataaccgatttagatggcaacttcacattaaacgttaagcaaaacgccattttgatattctcttatgtgggttataagtcgcaggaggtaaaggcagcccaccagatgaagattacacttcaggaagataatgaagtgcttgatgaagtggtggtcatcggttatggttcggtgaaacggaaagatgtgactaccgctatctcttccgtatctaccaaggatttggatatgcggcctattgtttcggcaggacaggccattcaaggtaaggcagccggtgtctcggtgattcagcctaacggtacgccgggcggtgaaatgtctatccgtgttcgtggtactacttcaatgaatggtagtaatgatccgctgtatgtagtagatggagtgcctgtagacaatatcaagttcctttctccgaatgatattgagagtatgcagatattgaaagatgcttcatcggcatctatctacggttcgcgtgctgctaacggagtcattctaattactacgaaggccggtgcagccggtaatgccaaagtttctttgacagcccagttcggtttgaacaaagtagccgataaagtagaatccctgaatgcagcacaatataaagaattgcaggatgaaatcggactagtgtctttgccggacggattacccgaccgcaccgactggtttgatgaaacgtatacgaccggaaagactcaaaattatcaggtagctgtatccaatggtaatgagaaaatgaaatattacctttctgcgggttacctcaaagaacagggagtgttggacatctcttattacaagcgttacaatttccgggtaaatttggaaaatcaggttcgtaaatggctgacagtaagtgccaatatctcttattcagattatacaagcaatggaggcggagcaatgggaacaggctcgaatcggggtggtgttattctggctgttatcaatacaccgacttatgcgccggtgtgggatgctttgaaccctaatcagtattacaataacttctatggagtgggtaatatcaccaatccattagaaaatatggcccgcgcgaaaaataacaaagacaaagaaaaccgcttgttggcatcgggtaatatattgctgactccatttccggaactgaagttcaagtctactcttactcttgaccgtcgcaacgccgttaataccacttttcttgatccgatttctactgcttggggccgcaatcagtacggtgaggcttcggacaatcggaatatgaacacagtgctgacatttgataatgtattgacttataataaaaatttcaagaaacatggcttggaagtaatggccggttcgtcatggacggattcagactattcaaatagctggatcaacggctctcactatcgtagcgatcagattcaaacattgaatgctgccaataaaatatcttgggataatacaggtacgggtgcatctcaatggggaattatgtcattcttcggacgtgtagcttataacttcgacagtaaatacttggtaacagctaatcttcgtgccgatggttcttctaaattacatcccgatcatcgttggggcgtatttccttcattctctgcagcctggcgtatttcttcggaaaagttcatggagaacctgacatggattgacgatttaaaattgcgcggtggctggggacaaaccggtaaccagtcgggtattggtgactatgcatatttgcagcgttacaatatcggccgtatcgaatggtttaagaaaggcggcgaaggtgattcgactgattatgcaaatgctgttcctaccattagccaggccaacttgcgtacatctgatttaacatgggaaaccacgacacagaccaatataggtctggatctgaccctattgaatggacggttgacgtttaatgccgactattattataagaagaccaaaaacatgttgatgaatgtgtcattacctgccggtgccgcagccgctacgtctattgcccgtaacgagggtgaaatggtaaataagggttttgagctttctattagttcgaaaaatcttcgtggaggagcatttacatgggatacagacttcaatatctcttttaaccggaataaattgacaaagctggaattacagaaagtttattacgatgctaaaactgcggatgtggtgaatgactatgttgtacgtaatgagccgggccgtgctttgggaggtttctacggttatataagtgatggggtagatcctgaaaccggtgaattgatgtatcgtgatttgaacaatgacggtaaaatatcatcttccgaccgtacctatatcggtgatccgaatcccgattttacctatggtatgactaataccttttcatggaaaggctttaatttgagtatctttatccaaggttcttatggaaacgatatttataatgcttcacgtattgaaacggaaggtatgtatgatggtaagaatcagtcggcccgtgtactgaatcgttggaaaatacccggacagataacagacgtgcctaaggctaatttcaaattactcaattctacctattttgtagaagatggcagttatctaagattgaaggatgtttccttgtcctacaacgttaaaggtaaactgttgaagaaatggggaattacccgtttgcaaccttacttcacggctactaacctgctgacatggaccaactattcgggaatggacccggaagtaaaccaatggggtaacagcggtacggtacaaggtattgattggggtacttacccgcattgcagatcatacgtgtttggtattaatgttgaattctaatgaaaggaaagattatgaaactaagaactatattttacggattaacctccggcttgctattgggactttcttcctgctcgctgaattatgagccattagacacctattcggatgtgacggaaggggtgacaagtgatggtacaaaaatcgtattcaaggataaagctgcagttgaaagtcatctgacaacgctttataatcaaatgcgtgaccgtcaggaacattggtatgtggatttacttttgatttcagactcccattcggataatgcttatgccggtactaccggagcggaagttgtcccgtttgagaataattcgattgaaggttccaattctgtgttggaacgtgactggaaccgttatttggaggatgtggcccgtgccaataaactcatttgtaacattgacctggtgacagataattcgttgactactgccgaacgggcgcaatacaaagcagaagcgaagatgttccgtgccatggtaatgtttgacatggtacgtctgtggggtgattttccggtgattacaacggtggctgatgatattacttctgaaaacattgatgaggtatatccgcaatatttccccaaacaaaatacggaacttgaagcttatcagcagattgaaaaggatttgttggatgcagtattgtatgctccggacaatacgccggggaataaaacgttgtttaccaaatctgtagctcgtaccttattggctaaaatatatgccgagaaacctttgcgtgattatacgaaagttattcaatattgtgatgaggtgaaagcagacggttttgatctggtagatgatttcagtgatttgtttggaatgaatgctgcgggaacagatgcaaagatgcgtaatacaaaagaatcgattcttgaagcacaatttacatccggagcaggtaactggtgtacatggatgttcgggcgtgatctcgtgaattggaataacaatttcacgtgggcgaaatgggtgactccgtcacgtgacctgattagtgctttcaaacaggaaggggatgaagtccgtttcaaagaatcaatagtctattacgattgtaattggagcaactattatccgtctgataattatccgttcatgtataaatgccgctctgccaacagcagtatcatcaagtaccgttatgccgatgtcctgttgctgaaagcagaagcgctgattatgcaggatacgccggatttggaaggagccgccgatataatagataaagttcgcgaccgtgccaaattgggagcacttcccacctctgtccgttcaaacaaaaatgccatgctgaatgctttgcttaaagaacgtcggttagaactggcttttgagggacaacgatggtttgatctggtccgtctggacaaggtagaagaggtgatgaatgcagtgtatgctaaggattcaggtcgcaaagcgcagatttacacttttgataagaactcttatcgtttgccaattccgcagtcggtaatcgacgcgaatgataagattcaccagaatccgggttattaattcaactaaaaacatagaaaacttaagattatgatagacatgagaaatatagcattgacctttttaggatgcttcaccatattagctgcatgcagcaacagtgacgatgcggagaaaccggttacacctgttccgactggagatgtgactatttatgcgaccactagcagcctgactcgcgatttgacccgtgatgccgttaatttcagctcgaaagataatttggcacctacttcaatcacattgaatccgactgaacaatatcagacaatggacggcttcggagctgctatcacaggcgccacttgttttaatcttctgcaaatgaaaccggaagatcgtcacgccttccttacggaaacattctctgacgacaaaggcttcggatttagctatatccgtatctctatcggctgctcggacttttcattgagcgaatatacctgctgtgatacgaaaggtattgagcattttgctttgcaaagtgaagagaaagactatatccttccgattctgaaagagattttgagcatcaatccttctattaaagtcattgccgccccttggacttgtccaaaatggatgaaagtaaagagtctcacagatcttactccgctggattcatggacaaacggtcagctgaatccagcctattatcaggactatgccacttattttgtgaaatgggtacaagccttcaacgccgaaggcattgatatttatgctgtaactccccagaacgaaccgttgaaccgtggtaattccgcttcgctttatatgagttgggaagaacagagggactttgtgaaaacagcactcggacctaaattcaaaacagccggactggctacgaaaatttatgcatacgatcataactatgattatagtgatattgcaacggaaaagaactaccccggtaagatgtatgaggacgcagctgcttcccaatacctggccggagctgcttatcacaactatggcgggaatcgcgaagagcttttaaatatacataaagcctatcctgaaaaggaacttcttttcacggagacttctatcggaacatggaatagcggacgtgatttgtcgaaacgattgctggaagatatgaaagaagtagcattgggtacgatcaacaactggtgtaggggagttatagtgtggaacctgatgcttgataatgaccgtgctcctaaccgtgaaggcggttgccagacttgctacggagcggtggatatcagtaatagcgactataagacaattatccgcaactcgcattactatatcatcgcccatctctcaagtgtggtgaaaccgggagcggtacgtatcggtgcatccggctatgctgatagcaatatcatgtattccgctttcgagaatccggatggaacatacgcttttgtactgatgaataataatgaaaagactaaaaagataaccttaagtgatggtaagcgtcattttgcttatgatgttccgggcaaatctgtgacttcctatcgttgggcaaagtcggaataagaaccttaaaacgatcaagacaatgaaaaaaaacagttatattatattggctttggcaggaatgttatccatgaattcctgtaatgatgacgaattcttgcccggtaatccgagtatggaaatcaaagcagagaatgcagatgctctttttggtgacagtcttccgtttacgattaaagcctcggatgtggatgtgcctctttctacgttgaaagcacagcttttttatggagaagaacaagtgtctgaaacggtcatccgtacaaagacaagcggaaatgactatactggtaaaatttttgttccttattatgctaatattcctaatggaaaggcaactttgaaatatattcttcagaacattcattttactactacagaaatgacgaaagaactcgctctggcacgaccggacttcccctatctgacattagtggatgaggaaggaaaagagtaccggatggaacgtcaatccatgtacaagtatagtgtgacaggagacttctcgcaaaagatgaaagcgtatatcaagactccgaaagtgggagagaatgggaacgaattgactttcggctgggagaatggaacgattgaagccggttctacgaatgctatctcattttctaatacggaaccgggaaattatgctatcaagtttaatacgttgacttacgaggcagaaccatttgccaagttaaaggtgaacggtgaagatatggaattggtagagaatgatatctatgcaatcaagttgactttgaagaagaatgacattctagcgtttgaaggggtgcctgattatgataattggtggatagaccaggattattttgaaaagcaggaagatggaacattgaaattcctgccgattgacggaagttaccaaataacagccaatggtaaaatgaagtatttctctgtcattgctttgaagaatggtgaggctgccaagttgcaggatgatggaacaggtgctatctgggctattggaacaggaatcggtaaaccgtcggtggcactttctgaagtagggtggactccggaaaatggtctgtgtatgccacagcttactgcgaagaagtatcaactgacatttatagctggcgttaccatgaaagtggatgatattaactttaagttcttccatatcaataaatgggacaacggcgagtttaagggtgatgctatttctacaacgagtgaattggttaaaatctcatcggacggaaacttgggactggaagaaggtcagaagttcgaaagaggaggtatttacaggtttacagttgatgtgacgaaaggcaataccaaggctgtgttgacagtggagaaagtagggaaggtagatttacctgcaccggatattttctttggtaatgataagatggaggtgacagatactgatatatataagtcggatcaggcgtttacacaaggacaaatgataactgttacaggcattgataatttgaatgaatggtggatcgatcctgacttctttgagaaacaaagtgatggtgcattgaagttcctgccgattaacggagattatcgggtgacagctaatgctgttttgaagtatttttctgtaatggctttgaaagatggtaaaccggccaaattgcaagatgacggaacgggtgcaatctgggctatcggaaaaggaatcggtaagccttctgttatgtcttccgaagtaggttgggagccaagtaaagcgctctgtctggcgcaagttgcttctaaaaagtatcagctaaccttgaaagccggggaaacgttgaagactagtggtgacccggaagtgattagttttaagttcttccatcaaaatgattggggaggagaattcggcaattatgcaagctctattttagtggaacagcttaaacttgcagattccggaaatttggaaatgcaggataataaagcatttgaagaaggagctgtctatcgatttaccattgatgtaacgaatggcaatgcaaatgctgatctgaaggttgagaaaataaattgatctgaagattaatgccggatttttattgaaactatcctgaaagggtatgatgaattgtaccctttcaggattcatctttggtcggaataatgtaaaaaacattaataaactcgtccgcaactaggaaatatcccctgtttgggagtctatataaataaagtatgaacttatttcttatatcataaatgaacatgaaattcaaagcaatgttacttggcttgtctgtgataactgcgttgcctgcctttgcgcagaagcccgtgtatctggacactggtaagcctatcgaagagagagtgaaagatgcattgaaccggatgacccttgaagaaaaggtgaagatgattcatgcacagtctaaatttagttcggcaggcgttccccgcctcggaattcccgaagtatgggctaccgacggtcctcacggtatccgtccggaagtgttgtgggatgaatgggatcaggcaggatggacaaacgattcctgtattgcctatccggcactgacgtgccttgctgctacatggaatcccgaaatgtctcatctttacggaaaaagtatcggtgaagaggctcgttatcgcaaaaaagatattctgttgggccccggtgtgaatatctaccgtacacccttgaacggacgtaacttcgaatatatgggagaagatccgtacctctctgccacaatggtggttccttacatcaaaggtgtgcaagagaatggagtggctgcttgcgtgaagcattatgcattgaacaatcaggaattcaaccgtcataccaccaatgtacaattaagtgatcgtgctctttatgagatatatctgcctgcttttaaagcggctgtccaggaaggtggaacatggtcgattatgggctcctataatctctatcagggagagcatgcttgtcacaacaaacgcctgcttaaagatatacttcgcgatgaatggggctttgacggcgtcgtagtgtccgactggggaggtgtgcaccataccgaacaggcgatccacaatggcatggacctcgagtttggttcatggacgaacggactgtctgccggaacgaggaatgcctatgataattatttccttgctttcccttacctgaaattaatcaaggaaggtaaagtaggaacaaaagaattggatgaaaaggttagtaatgttcttcgtctgattttccgtacttcaatggacccgcacaaaccatttggctctttaggttctcccgaacacgggcaagccggacgtcagattggagaagaagggattgtactgttgcagaacaacggtaacgtactgcctatcgatttgaataaagctaaaaaaatagccgttatcggtgaaaatgccattaagatgatgactgtgggcggtggtagttcttctttgaaagtgaaatatgagatttctccgttggatggactgaaaagtcgtgtgggctcaaaagcagaagtggtatatgcccgtgggtatgtaggcgacccgacaggagagtataacggtgtgaaaaccggtcaggacttgaaagataaccgttcggaagatgaattgcttgcagaagctttgcaagtggctaaagatgccgactatgtagtcttcttcggtggcttgaacaagagcaatcatcaggattgtgaagattcggaccgtgcttctttaggtttgccatacgcacaggatagagtgattagtgaactcgcaaaggtgaataaaaacctgatcgtggtcaatatctccggcaatgctgtggctatgccttgggtaaatgaagtgccggccattgtacaaggctggttcctgggttcggaagccggaacagctcttgcttccgtattggtaggagacgccaatccttcgggaaaacttcctttcaccttcccggcaaaactggaagatgtaggggctcataaattgggcgaatatccgggcaataaggaagaactggcacagtctaaacatagaggagatacgattaatgaaatctatcgggaagatatttttgtaggttaccgttgggcggataaagaaaaaatcaaaccgctgttcccgttcggacatggattgagctacactactttcgcttatggaaaaccctcggccgacaagaaaactatgactgcagatgataccatttctttcacagtcaatgtgaagaatacaggcactcgtgaaggtcaggaagttgttcagctttatatcagtgataagaaatcctctctccctcgtccggtaaaagagttgaaaggtttccaaaaagtgaaactggctccgggagaagagaaagcggtaacgctgacgattgataagaaagcattgagcttcttcgatgatgctaaacacgaatgggtggccgaaccgggtaagtttgaggcaatcatcggtagttcatccagagatattaaaggtactgtaccatttgagttgaaataggtagatgtttggttagagattttttaaggagatgacagagagtctgggtactcggaaaacgctaagtgattgcaacaaattgacttagcgtttttttattgcctaattttccctgcgtttgcaaaaaaatagtaagaaagtagtcgtttcgcttggtaaagtgttgtatcagaagtaattttgggaaaaataacaattaaggtaacctaattatggaaaaaggtatttggctggaaatagaggaactgtataaggagtttcagcaactcggtatcagtcagtcggtggactatgagaagtactacctctattctcttattacccattctacagccattgagggttctacactaaccgaaatggatgcacagcttcttttcgatgaaggtgtaacagctaaaggaaagccgttggtatatcatctgatgaatgaggacttgaagaaagcatacgagcttgctaaaaaggaagcgcaacgcaatactgttataactcctgcttttttgcagaagttaaacgctactttgatgcggacaacagggggaaggcataatacaataggcggctctttcgattcttccagaggtgagttccgtttgtgtggcgttacgcctggtgtaggtgggcgttcttatatggattatcaaaaagtacctgttaaagtagaagaactttgtttcttgttgcaggaacggcaaaagaatgtggaaacgttccgtgaacaatacgaattaagttttaatgctcacctcaatttagtgactattcatccttgggtggatggcaacgggagagcagctcgcttattgatgaactatattcaattctgctatcatcttttccccgctaagatttttaaggaggatagggcagattatatcctttctttacaacaggcgcaagatgatgaaaccaaccagccttttttggatttcatggcggtgcaattgaaaaaatcactgtctttggaaattcaaaaatataaagcttctcacaataaaggatttagttttatgttttaatcttgtagggcttcttttgataagacttccacccattgtatattgtgttgtttttcattaacgaaatcaccattacagtaacggcggttgcatttattaatatcgaacttatgtaattctctaagtaagcgtctccgcgattctatatagtgtattaaaataaaaaggctaatgatccctttttagtcattagccttttcccatctgtcaggaagcagttccctgtatttttcaattggtgtgttcggttgccattcggctgttctgtttatcacatccgtgagatactcaaataaattcactttatgcatcctacaagtgagtgctatcgtatagagtatagcgcctcgttcggcccccttatgactgccgaagaacaatgagttttttctagataaggatatgtaccggttcatccgttcaaccatattgttgtccagataagtgtcaccataattaaagatgtccaccactgcattccactcattgcgaagataggtaatggcttcctgcagttcgctcttaggtaataaatccccccgttcttctatttcatcaagcacatcttttatttctccgagtatgtccggcgcatacttttttcgatgcataagattctgttctaccgtccatccctcagccccaactttatgcttatgctcgttttgataaagtgcgtttatcagctccacgatcctttttgcatccgggtccttctcaccgcaatctataaatttccgttttatatgttgcaagcacgggatgcgtgtgatattgggataagcatcgctttcgagcttccggtaaggtgagtaaccatcgctttgtatgatacctttgcaactgcctaattcgttaagaataactctttcagaccgggagccgtcatcatagagcaagtatatcatcctggtgtttatgccgacaaccacccaaaggtatcccttcctgactccttttcccttgctgttcttttccgggacgagtattttgtaataggtttcatcggctgccttataaggatcactcaaagctgtctgccggatgcacttataaagattttcgaagaggtttgaggctttctctatcaacttatgagccgtaggtttcttcagcgtaaagccatgactctcgaagtagttgatgattctttcaacaggtagcgattgtatataacgtaattccatcaatccggcaataaatgaaccgtcatagctggaattcaagaaggccgaagccggtgtttttccctcaaacaggcgaccttcttgcgtataggtgtgtatcttgtagacatgcttgatgaagcgcatgggtacacattcatagcggacgcatattctgggaacagtggtaaacaaccgggccttattgatgtcaaaatcgggatcatcgggataaacgacatgttcttcttcctccatctcataatgcatgtcacgtttggccccattattctttcttgctttacgcttatctgctttttccgcttctatcttctgccgctcttcttcggatatggcagattggggagcctgttgctgttcggatgtgttggatacaagtttggcgagtcccttagtaaggcgctgttgcttgctaagagattcgcctttttgaaggagtgcctctttaagggaagaaacctcctttatcaaagcatctatttggtccaagagtctgttgttgtcatctcgtaatcccttgatttgttccttcaataactctatgatctcatcctttttcatggcataaagatataaaaaatcaacgaattggccaaataaaccggatgatatctttagcacaaataactaataatcagaatgttgaattagatcctgaaacgctttctcaaccgtacagactttaatgacactccatttaagataaaagacaaaacctgataagaaatctcgtaattgcctgtattggggttaaatgtcggtaactcaaaacttccaccttcgaggcgcttgtagtacagaagaaagccatcgccatcccaacgcagtatttttacactttgtcggtttttaccaaagaataaaaagatatctccggaaacgggagacaagtccttcatttccgatcgtataattttgaataaaccgtcaatgccaaggttcatacgaacaaagccctggtacagatagtagcgattggctgatgttagagaatacatggatctccctcctttctttcgtaatcgcgcaacattttaataacaccaccgggtgtggcccgtttgaccgaaatggtggttccactgttaaaggtgattgtgatcccggcaagactaaactcttcttccgacaacatggcgggtgctatttgagtgaatgaaggagaggaagttgtcggttgggagggttcaacgccgccataataatcacggaccacatctgccttggcttgtttaacgctatagccccgtctggacatccaggaactcataccaccaaaagtggtatgctgatcgcggcaaacatcggctaaagaacaattgtagtctactttcaatgcttcaaggaaatgtttccaagtttttccaaatcgattttctgctaaatccataatgcttcatttttatacatagcaaaaatataagaatgaaaaaagggcgacaagatagaatcgcggagacgcttacgctaaaattaataagctcatagcaaacgctccatcaagtattaacatttgagctatcgactattaatactttgtatttaggctattaatacttgagttgttggctatatatacccaaggtgcaagatatatatatccaacgtgttagatctatatgaccaatacattggatctatatgcccaacaaatagggtgtatagacccttaatctatacgatataagcatcttttagtctggttatttgaaagaaagagaaacaatcttgttaatatctgctaaggagctatatcgataaaaagctatctaaacttgggggcttactagttctccgttaacaatcttaaagcttataagaagtctctctttcgagtgcaaaactaaaagacgcttacttttattttgtgaaggaggtgaaggatgattctttattattttatgtatctctttcaccataaacatctgatttatactcattcaactaaaggtgaaaccggtgaacctcctaaatgaatcttatagttacaagtagctttagaagattttgtcttttgctgatcgttgtaaacttcaatttatattgattttcttttctcttttctgattttatattctatctttgcaatgctctttatcaaaatccacagcaggggaacctgctgtatcaatgtggcaggcttttttatgcttgtcctatcattctatatggcggtttcgtacccccatgtaggatgttaatgcacctactgcctgttgtggatggtgaagagcaatgggacaggcggaaccgcttcttttatttcttaaaactacccttctgtatcgccccattgaacttaatttattcaccatttaattaaaattcttatggaagaagttttaagcaaccagcaggctcgtccgggggacgcgacgcaactcatgcacgttatcttttcatccgatgatgaaatgatgtctttttatctgactctcaatcgttttatgaatcctgaaagctatctagtggaacgaacagatcgaaagagactggaggatttagctagtacgctttgtagtaatgtggcagcctttgaagccatccgtaattataagtcgataagtgtgaaagaggtgattagaggattcggggcgcacatgatgaatacgctaatctccaataccaatcgtttccaaagtgccgatgccgtgggaacgttaatgaattgcatactgaataccactaaaaacagttggcagtttaagaaaatggatcggaataatgatatacatcttcaaaatgtacgctatttgttgaatcggctggatgcggcagaatctaatgaagagaagaactgtgaagaagtagcgatataaacagttttctctaaaaattacttaggaaacgcaaatagagggtataagaatcggagataatgtatagataaaggcaaatgtaacgtaacataaagcatctgtaacctgcccgatagaaaaggaacacaagacgttgtgctccttttttatattgttgtaactttgctttcagataatatgataaagctgattgttatgagaaacacactttttgggattctattcctttttattttgcctcttcaggcacatcagaaacttccgtatttgcagaaacagggaagtaccacacaacttatggtagatggaaagccattcttggtgattggcggtgaattgggaaattcttcagcttcctctattgaagatattgaacgtatattcccgaaattgcaacgtatggggctgaatacggtactggttcctgcatattgggatttaacagaaccacaggaaggtaaatttgattttactctgacggataaagtgattcaacaggctcgcgcgaatgatttgaaggtggttttcctttggttcggtgcgtggaaaaactcaatgagttgctatgctccgatctggtttaaggaagattataagaaatacccgcgtgcctatacgaaagcagggaagcccctcgaaatagccagttccttttcggagaatgtgtttcaggcggatagccgtgctttttcccaatggatgaaacacattgcttctgtggataaggaagagggaacggttatcatgattcagatagaaaacgaaatcggaatgttggaagatgcccgcgattattccaaagaagcggataaactgttttatgcaccagttccgtctcttttcatcgactatttgcaaaagaacaagagatctctgcatcccgaaatgttggcaaaatgggagagccagggattcaagaagaaaggtacgtggcaggaagtgtttggtgcagacgtgtatacggatgaaatttttatggcctggtcgtatgcgcagtatgtagaacgaatggcaaagttagcacgttctatctataatattccgttgtatgtcaatgcagcaatgaacagtagggggcggaaaccgggagaatatccgtcggcaggaccattggctcatttgatagatgtatggcattatgcagcacccaacattgattttctggctccggatttatatgataaaggtttcgttgattgggtggcaaagtataaactgcacaataatcctctctttatacctgaaattcggttggaagacaatgatggagtacgtgctttctatgtgtttggtgagcatgatgcgattggcttttgtcctttctctattgaaagcggttcggatagagcagatgcacctttggtacagagctatattaaattgaaagaactgatgcctttattgacaaaatatcagggtaaaggagtgatgaacggtcttttgtttgatgaagagaataaagaacgaatactttcatacgatgatttggagattacctgccgtcattacttcactctgccatgggacccacgtgcccgggatggcactgtatggcctgaagggggaggtgttttgctacgtctggctccagatgagtatatcgttgccggcagtggcttggtacttgaatttaagaaacagggggaaaataaaatgaaaagttcaccggcattgggcgaggatggttttgccagtgtgggcggaaaggcatcaaaaacggaaaatagctggcaaggtggtatgagagccggtatcggttctgtagatgaagttaatgtgaacgaagatggttcactgaaatatatccggcgcctgaatggcgatcaggaccatcagggaaggcatgtacgtattcctgtcggagaattcagtattttacacgtcaaactgtacgagtataaataatgtgacgacatggtgcacctttgttggctacatacatatagaagagtggagtcattacttgcctagtaccaacagactttccggtcccatattgaacaacaggtctatgatactcaaattaggaagaaaacccagtttgggctcgaaaacctgatagtaaggttgcggaataaactctgtatccacttctcggaaatcctttttgggatgaatgacttcccgaaaatcgaattctccgggagcaaactccatcttatattcgctagtacgctccatagtggggtgaatatctatcaattcacagaccatccggcatagttcttcgttgaaatcgattaaaaactcgtatttcttttcgtagaagggacggaagtcgtccttgtaatattcaaagaaaggagtactgttgtaggctgattcgatggcgttccagtgcagatgtctccagttgccgtggtcggaaatgcggatatccttcatcggacacttcaatgtgtcgggttttacggttgggatagaaagggctaattcgccggacgggccggcaatggtgcaccggttacgataggtttgtttgatataatggtcgtgttgttctacaagcactttgtcataagccagaagtttagtgtaatattcgacgggagcgagataagctgaagataaataagctattttcatttctttcattttaatacgtttaggcggctctataataaggatattaattaaggatattattaaggagttatttcttttatgttccggaagattatttcaccgttctgaagaaacggttccatcggtatccgtcaaacaagcctgtctctttttctttggagaaccaaatgatggaggctttcccgatgatatggtcttgcgggacaaacccgaagagccgtgagtcggaaaagttgacggtattgttagaccccatccaatagtaatctttagtgaaataacagtgttgtgtaggtttgccgtctacgtagagagtgtcgttctttatttctgcctgtttgccttcgtgcatcacgagggtattccgcagtaaggttatgttccagggatagacccggataaatttcccttttccgggaacaatcagcggattcggttcggcatcttccctgtttgacaaaggttggacaaaactctctttcccattcattgcctgttccaacaaataatattcgtaacggctgaaactacgcacatgagtactgtcattgcttcccatcaatccgtcgttggtgatggaaagagtatgcatcagtgaggttatcagattttcttttgacgcggggtacgaataaagccttttcttatccggattgaattgtgcctctggagaaataacggagaaaagagaatcgaccaataatgtatctcccggaactccgaggcaacggctgatatagatttcccggcggtcgatgataggttcccggattccagccggattattgaacactacaatatcttgttgccgtacaggactttcgcaccaacgatgataagaaaagagcgacatgaaaggaactcgcaatccgtaactccatttgttcactaagatacgttcaccctggaaaatggagttttccataccggtggaagggataaggcaggacgtaaaagcaaatccccggagcagaagcactacgactactgctccggcaaatgctagtatccatttgaatttacgaatgttcatcaatatttatcaccttatcactctattctatccgtacacttatcagtctacccacttgaagaggcggttccagcgaatcttaccgtcaaaccatccacggtctttgtcaagcgacagccatacgacaatcggcttgcccactacgtgatcttcgggtacaaaaccccaataacgggagtcggcagagttgtgacggttgtcacccatcatccagtaataatccattttgaaggtatattcattggtcttttcaccgttgatgtagataccgtccggtttcacttccagcttgttgccttcgtaggctacgatgcaacgctcatagataggcaggttgtcttctgtgagggtaatggtagctcctttggcaggaatccagatcggaccgtaattgttgcggttccatttggtataaaggttcagcggatacatctgtccggcgtattcttccggttccattactattttgctgattagctttttattgccaaggagagtgtcatacatctttttagtcaatggaagatgatataccggattcagtttgccttgcgcattccggttgtccagtcccatatccaataatccgccttcccagccagagtcttctatcagcatggtgtcatccttgctgatgcctaattcgcggagcatatcttccggaatgtacgggccggtagtctgtacgaagtagttgaattgcaggttttcggggttctcaatcgccttaccgtcaatcatcacctgtccgtctacaatttgcaatgtatcaccgggcaagccgacacaacgtttcacataattctcgcgacggtctaccggacgccacagtacttcaccgtaagtacgcggattgtttagaatctgtttacgtccggcgtcatagtagaggtcatagattgcacgttgctgtgaacgtgtcaggctatccatttcaatctgtttggagtagatgcgttgtccttcaccataagccagcgtatagaagtccgttgtctgttggtagttcactgccaccgtatctcctgccgggaagttgaaaaccacaatgtcattcagcttcactttgccgaagcccggtacccgtttgtatttccattgtggccactcgatatacgatttagtattgaatacaggcagcgtatgttgtgccaacggcatagaaaggggagtgttcggtacgcggggaccgtagctcatcttgcttacatacaggaaatcgcccaccagcaatgatttttccagcgaagaggaaggaatctggtaattctggaagatgtagatattgacgaagtagacggcaaccaacgcaaatacgatggcatccacccaactcatcacactgcggacagccggattcttcgacttcttccaaaaagaccaaggtattttctttgtgatataaatatcgaaaatgaaaggaacaacaatcaatccccaccaactccgtacccagaggaggaagacgaggtaaagtagaatagcaatggcacatttgatccattgtgcgcgtgtggcttgtctcataatgttatatttgtttagaactagcttctgaaatcttagtcgttcaagaatgggaataaatcactcatgcccaaaaaaccttcgtgtgtggcagtatattcggctgccagtacggctcccaatacaaatccaccacgacttttggcatcatgtgtgatagttatgctgtctacatcagattcatagcgaatggtatgaaggccgaacacttctccttcgcggatagaggcgataggaagttcattaggggcgcaatcgttggttccgctaatggttccgtccggtgcaaggaaagtgcctttcacccatttgtccttacggtccagcttttccagaataccttccgccaatgtaatggctgttccgctgggagcatccagtttgtggatatgatgtgtctcgctcatggtgacatcataagcagggaactgattcatgattttagccagatacttgttgagagcagagaaaatgctgactcccagactgaagttggacgaccagaacagtgttttgcctccttcagtgcagagctttttgatttcttcgccatgctcggccatccatccggtactgcccgataccagttttacaccggctttgaacgctttcatataattgctgtaagctaccatcggattggtaaactcaatggccacatcggccgatttgaatgcttccgattcgaagtcatcctgattattgatgtcaatgatgcagacgatttcatgtccgcgactacgggcaaccttttctatctctttgcccatctttccgtaaccgatcagtgctattttcattgttttctgacttatattcaaaataatagtcgcaaagataagatttttattacatttgcagcgcacattaacgtcttgttaacatggaacatcttctccactacgtgtggaaacataaattatttcccctgaaagtactgcaaaccaccaacggcttaccggtagaagtgattgactccggtctgcaaaacccgaatgccggtcccgacttttttaacgcgaaactaaagattgatggtgccttatgggtagggaatatagaaatacatacacattcttccgattggtttcgccacgggcatgattgcgacaaagcctatgattctgtgattctccatgtggtgagcgaggcggatacggaaataacccgtaccaacggtgaacagataccacaactattgctgacttgtccggaaaatgtgcaatcccattatcatgaactttgcgtagccgatcattatccggcttgctatcccatccttgcttctcttcccaaacttaccatccattcctggctgaccgctttgcaaacagagcgtttggagcagaaagcacagttaatcatgcagcgtctcgaactttgcaacaataattgggaagatgctttctttatcacccttgcccgtaatttcggtttcggcttgaatggagatacttttgaaacgtgggcgggattgttgccatttcgtgcgttgggtaagcaccggaatgatttgtttcagatagaagcttttttctatggtttggctgggttgttggaagaaacatttctgaaaaaagaacaggaagacgaatatagtcttcgtctttgtaaagagtttcgttatttacagcataaatttgaaatcgggcaggggatggatgctactttatggcgttttctccggcttcgtccggaaaactttccgcatattcgcctggcgcagttggcttatctttatcagaaaggagacaagctgttttcacgtttgttggaagcggaaactctggcggacgtgagagctttactggatacccgtacgtctccctattgggagaatcattatctattcggacgactatcttctcaaaaggaaaagacgatgggagagcgttccaaggatttgattgtcattaatacggtggttccttttctttatacctatggtttgcacaaggcagatgaacgaatgtgtgaacgtgccgcacgctttctggaagaattgaaggcggagagtaatcacatcattcgttcgtggagcgatgccggacttccggtagtcagtgcggcggatagtcaggcactgatacagttacaaaaagagtattgcgataagcggaaatgtctgtactgccgcttcggctatgaatatttgaaacatacaaagatttagttcttaaaataaccaagatgccaaacttgtcattatctttgcgccgttaattaaactcttaatttatatagtattatgagagctaaaaagtttgtatgctgcttgctggctatgatgctgctcgcaggtgtttcgtttatctcctgcggtaatagttccaaggcaaaagccgatagtgaactgactacacaagacggtgaagatttcaaatcctttttggataaatttacttccagtgcagccttccagtatactcgtatcaagttcccattaaagactccgatcactttgttggcagatgacggagaaaccgagaaaacattccctttcactcgggaaaagtggccgttgctggatagtgaaactatgaaggaagagcgtatcacccaggaagagggaggtatttatgtttccaagtttacgctgaatgaaccgaaacacaaaatctttgaagcgggctatgaagagtccgaagtggatttgcgtgttgagttcgaattgcaggctgacgggaaatggtatgtggtggattgctatacaggctggtatggatatgacttgccgattggggagttaaaacagactattcagaatgtgaaagaagaaaataccacattcaaagaaatacatccgtagagataagtatcaatatcaagtattaagtattagccagtcatttaatacttaatacttaatacttattattagggttctcctacataatatcctagttcggattcttttccgtccaccatctccctgacaatgccgtttttagtgttgaaatcctgatagagttcttcataatcacgtgtataatctgcgtcggggactacgttaacatcaaattttagttctgcttttccatttgggagcatattgccgaaaatccggatgcggtgaaccacttcgcctacattcttgatgctgttgtaggttgctttgaattgcctgataccgtcttcgggaatgatgatatgcgaacttttatccagaatgatacagccacaggaaggttgcatttctgaaatgattaacggagcgtctcccgtgttggtgatggtaaacatgatatcgagttgctgaccttgcttgatagggtaatagtgcctgacggaatcttttatcgtcatgctggtgggacgtacttcctttctgcaccctgtaaagcagagcggaagtgccgtcagtagtaaaatatagaatatagatttattcattgttgccatttatttttgttatatcactttttcagcatttaagggatgaatgcaatttcatcgatacccatttgcgttcccggcttctttaaacaactgatttttatgcttaattgttctgttccgttcaagtctgccggaacggtggctttcatcatttctcctttttctggggagtcttccggttttaagtctattgttttataggctactccgtctttcaacagttgaacttgctgtggagcatagatgcggtggcggggaagattcagaaaactgatatagaatgttcctgatgcattgagtcctttaaccggcaggttgatggtacattcttctcccggaatgataacccaaccgcaatgatagtctccgggtaaaccgtgagtgccatcggtcagtttctttgaatcatttttatttagtttaggggttgcggaaggatgcattcccagaaacaaacttttctttatgtcggaagcaagtatatattgttcccattcctttatataatagtcaatctcataagctgactcattataatatcccattccggcaaatgcttgatgctctttgagctgggtgacccatttacgagcttggggaagcggttgaatatcctttccattccgcttggcatatccgtaagcgtcgaaactgtggtcacgtgctaattccatgcgcgtgaaagacaaggcggtctggagctcgtgcagctttttgcgctctttcccttttgcttcggatacaaaatctcccatttcatcatagaatttgataaacttctccggatagaggaatcctttttccgattctctgataccggcgtaaagtccgagccgctttccggattgggcgttgttttctagctctgtgtagtaatcgtacagccattttttggataccgggtattcctgattgaaatagcttttaattaactcatcaaccggaagctccgggttgataagaagggctgataatacaaaagtcctcatttcatcgaaggaagaatagctgtaaccgcttccgttgaaaaatatgccgctggctccgtgttgtttgaaaagttggagtctttgctgggctatctttaatatggggaaaggagtgaggtagtcgtcgaagttgttgatatagtcccatatatagatgttgttcgttactttcttccagttgtcgagttgttccgcaaatttcttgtcttgctcgtccttgccgtctgtccggcggagcgggtagtcgatagcgctgacaattaccccgacgttaggcgggagctgcttgtctgtgacttgttgcgtagtcaggtaggaagtcgtaaagaacgtgtgtttgggaaaacgctgcgacaggcggaggatcagttccgtaacggcgggagttgcgttcttctctgtatttcccaatgcggtgcaggtggcacacgtacaggcgtacggagtatcatccggtgcgattacaaaacggaaattccccttttcaccgaagttatctacgatgtaactttctatctggcgatacatatcctcggaagagaaacacagttgtgagtcatctgtcttcccgtgaatggtggcatatactttctctgcatcttttcccaagacttttcgcaggttgtgtccccatattccccagctgtcatcaaagttgttcaggccgataacgcctgtatgatcggcgttcaggccgtatggagaataaatactttgatagtcaaatgcaaaagctccgcaagtatcgttgagattgataagggcgggaggaagatccgaaccgtctatacgcgggtcttctttgctgatcttctttatcagttggtattgcagccataacatttgtttgtcgtcacttgcggtcagtctgatatcagagcctttgcaggctactttgaatcctctctgcaatgttgggtctatctgtatgatgatgcgccacatgtccatttcggaaacgccaaaagctactatttcatcgtcgtttgcacgcttcttgagatgttcgtacaggtatttcgcccaccgggtgtctctgtcggtcggatcctcaccaatggtgacgagatacccttctttagatgggaacatctccgtgcgtgcctgcatacggcagccggataaaaggcagcaaatacatatcattcctgccaatacagggccaagcgtatcagaatgaaatataaacttgtgcatagatgttatataagtttttatagcgtgtcgatatggattctatcgggttgagcggactggtccctcgcacggtgttggtctggttataataagtattccaggtacccatcagacctatggtaatgttaggactgaccatatactggcctcccaatcccaccatagtattggtgtgagagaaagagccgggcagcgcatagtccagtacggccgtttccggtgccgatccgatgcttgccatggcgttgatatttgtctttccgtcattagccgggaagtatttggcgccaatctgagcattgtaatagaagttggagttgaagaagtgcatatctatcttcgtgttgagacgaacgacttcaatggtcttggctaattctccgcctacagtgagtaggttagtttttgactcattccaacccgtaaacagatagccattgtctccggtgccacctgcaaagaattcatcgttccattcataacgctttgtgtaggcggctacccgtctataacccacatgtgcacctatttcccaatcattcttgagataatgccgtaaagcgacatcagccgttatgtccgggaagtatttggtcgcaaaggctgcattggccgtgaggctccacttcggtgagaagtgatgcgtccactcaccttgtacctgaatgccgactcctcccggtgtctgttcttcagcctccatgctgtcgcttgccgagccgcttcgtcctgcatagttgagacgtcccgtgtagctgttcttctggccttttcgagtgtattcagcggtggcaacggaggtaatgatgtcttcttctccgtagcgtgcacgcaggtaggtcaaagcaatctcattcttgagcatcatgcttctaaggcccgataagtgtcgttggaaagagcgatattccatgatggatggctcgtagtacttttggtaataataggctgaatccgcttgacggttggcttcatataccactcccttggtgtacttcaatgatttgttctgactgtcgtagagcaaagctgtatcaagaacagcgagagccttttccggttctttcgcctttgtcagttgcagggcacgatattcactgctttgtgagaatgcgcctataatctctttgttactcgggtatttattgagtatcggtttcaggaattccaaagaagcttcgtatctcttgtcacgctcaaggacagtagccctctttgcctgatagaacggttcttcaggataataattgatcccttgagccgtatatttctcgaattcatcgtattttccgagtaaaccggacgaattgatggcataccgtaatccgagatcgctcgatggattcaggctaattagcttaacagattcctcgtatgctttcttcgtagctccggcttccatacatttcttgatgtacggcactgctagttcctcgtatccgataacatagaaaatgcgcatatcctcatcactctgctcgatggcagatagatacagttgcaaagcctcttcggttttatccattttatcgagaataaatgcccttttcaacgtgccgttttcgtaatcagggaagtgaagagtgatggtgtccaatgttgcaagtgcttcattgtaacgtttcatattgatatagcaactcaaggctttttcccatgcggcaccgttcacttcattgtcgtctacatgtttttgagaaacgaacaatacgtgcggcaatgcttctgcgtacagaccaagttccatcagtttttcagctttcttcatgtgttgtgcgctcatggcaagcgtaatatcataatcatcaggatacatctcatacatctttttcagcgttgaataggcaagatcatcctcattcatctggcgataaagcatatattctttataaagaattcctttatcattgttgccatattgttttttagcttctctgatatagaagagtgcgtcatcggtatatccccgggtgacagaagtgttcagcaggtagtctaatgcttccttgttcttattacctccttcgtaggccatgccatataatacataaggatcccgctgcttctctgctcgggcagcctccattaacaggtcgttatacatacgccgtatggcagggctgttgtttcttcgcatttgctcgcgtataaacaccagagcttccggataacgtgccaattcactaaggatactcgcccttttgacgataagcgcaccgcttcccggtatggcagccaaaccgttggatgaccagcctagagcagcttcccggtttccttcctgtaaatgcaggttaatgatgtccagataatattcttcgttttgaggagatactttgataagctccgtcagcttttcgatagcctcttttcggttaccgccttttttcatttgctggtagcctacctccatgctgtagatataatccttccttagaatcgtatcgttcgggtaaatctgattgattcgtttcaacaggcggtctgcttccacatcgttgttctgcttgcggtacagttcaatctttcttcgccataaacctctccaatacggattcacttccagcaactcattaacgtaacaaatagcactggaataattctcggtgatatcttctacgtctaccagcagatgtttggcattgacgttgttgtaattgtcatctatcgctttgacaagatgataacgcgactggtcatagttcttttcgtggaaccagtattttcccatgagccattcaaggtcagaaacattcgggtatttctgaaggccctcctccaacagctctttccctgcttcccattcctcgttcgcaaaatgctcctgtacaatctgggcatattgctccggtgtctggaatccgttgtcggtcccggaggaagaggttatcagtaaaaacagacaacctaatatggtgatcttatggagaaattctctgttcattctatcttgtctttaatctttctttcttgtttaaatcgtagcaggttcgggcttcattgccgttatatcagtaccgtctgcactttcttctttctgcttgaatcccttacgttccatgttcttccacttgaagtctctattggtcagataactgaggtatcctctcaatgaacagaaagtgatgatgggatgatagaagataggctctaatatggacgcaatgataatccacaggtattcgtatcctcttttatatagcatcccgacatagtagtcgtaggtaataacaacgatggaaaggaactggcagaacgtatagatcgtcaggtaaatcatccatgccgtgttccagttgactgctcctgtaaaggccagatagataaatactatcaaaccgacgagctcgatgatcggtgctagaaactcaaaaacgaacatataaggcagagttaacagtcccatctgtttatacgtctttttgaaaatcatcttacgatggatattaagtgtctggaacaatccccgtgcccaacgggtacgttgccggtaaagcattgccaggttgggaggtccttccgtccaacaacaagtatcaggaatctgtacgatcttataaggacgggagaagtcgcacatatatcctaccatgcgggtgatgaggtccatgtcttcggcaaaagagggagcatcgtatcctccggctgcaatcgctaccgaacgatcgaaaagaccgaatccaccggaaacattcggcataccattgatagcggaccatcccatcttaccaatcagataagagcgcatatactccagattctggaaaagtggaatcggtgtacggggagttctaacgtctatgatttgtccgtctttcacgacgcatccgttagccatcaacatcgttccgctgactgcaattacttgtttttctgaagatataatgggcgagatacaacgataaagagcatacttttccaaaatgcaatccacatccgtgcagataaaataaggatgagaagcaacgttgatacccgcattggatgcatccgctttggttcctccattttctttgtctacaacgatgagtcggctgtatttcgggttggaggatttgaggagtcttcggaacggtctggttttgattcgctcgatataagcatagggcacttctaccagttcataatattcggtcatcttttccaatgtactgtccgtacttccatcatttacaataaccacctcgaaaagcggatattccaatgcaagcatggagttcacattatcaatgattgtcttttcttcattgaaggcaggagcaattaccgaaatgcctggtgtatagggggattccttgattgttttccgcatatagctttccacatagtaatcctttctccgttttagagaaatgaaagagaggaaggcgaatgtgacgaagaatatcgccagcatgctcgtataaaagaatacgaaataattgaagaatgtaaatattatatctctcatgttctctagtttaactggttgattaacggatgcttggtgtgggcaaacaatatagctgtgtgggaatctgcttttctttccaattgatcgaatgttttccttcccattgcactatactcatagagggctttgagtatgactctcttggttccccagttatctgcttcatcataagcattgtaaagaaatcctaaagccttatcggtctttagatccgcaatagccgaaatgatttgtcgtttgacttcttccggttgtacattatacatttcaatcagcttaggttcaacctctttgtattttagtttacctaaagtcttgatcgcttcacctcgtatttccacagaacgggcattgagttgcttcgcgagaattggggcactttcggtttcattatatagccggatttcgttgataaagaatatcttaacgttttcttcagctgaagtattcacccatttaataaaggtgggtgtgttatatcccactttcttacggtgctccaagatagcgtgtaactccatcatgtcccattgccttaacttcatgccgatgtcttcgtcgaagaagcggaacgggtcaccctggcttaaccacatataagtgtagcgtgccgagtttcttagttctagttcacgatgatagaggaaacgcaccaataccgcttcagaagcatacccattgatggactgaataagtttcagagcttgtatctttgatcttttggaaccgaattgaagttcgcgttcaaggaaacgtgtgatttggaatacggtttgaatcgtttgatagtttagttcattgatctcatcttcatgcacactcttgatttctgttaatagttgagtgataatgcgtaactcgttaggtttcgggcgctttttcgtatcatattctaatctgtcagctatctcttcttcactcaatgtgttggaatctagtgagatagatttcatttcttcataatacttatcaaatgctttattgtatttccgcttctcttttcgccttttaaatataccatatataatatggaataggagaaataagtacgcaataatacaaaacattacagcaattgagcatattcttatgattaaaggatagccaataaacttgtaatatatccaatagaaataatattctatgtaatctataccatacagtacttgatccatttcccttgatatatttatatatagaacttgtatattcggaataaaagttctatatttgttgtattgaatgttctgtctaatgcaaatatacgaaataacttgtatatattatccattgttcatgaacaggctttttgagccctattttagctcttgtgattattctcgatggaaaggattgaaattacaaataaaggcaagcaaaaagctattaggcgttaaatatatttttgataagttaacaaatggagcctgaaaataagtgtgataagccaggttctcatgcgaaacaaaaacaaacaataaatttaaaaattaaattaagatgaaaattaaaagtttggtgtatgtccttatggggacaatgttggttactacttcctgctctgataatgagttggaaaaaggtaacgatggttcgggaactgttgacccggtaaatgcttctgcacttgtgaatgtatattccgataaaagtggttctgaagcgagcctgcttgtgggagatgtattagtgaaagattcccgtactcttacgttgaatgttcctgctgcttgcgagaaagtgtatatgaaatacaatacagtttcgggaacagaagctacaaaagaatttgctttgtctcctgttagtcgtggtgtagatcagagtactggtttcaattttgaaacaaaccgtctggcatcggtaactcttgcgcttcctgaagatgcagtgcagccgacaaatgaaacggaccaaggctatcttttctatcataacacaggtgtggtgatgttcgaagatggttggcctattcaactggattcatggtatgatgaagatttcaacgatgttgtattcgagtatgacttgaaggtgactgaatgtcatagtcaacagatgatggagactgtaggaggtaaagaagaattgttgttgactttggatgttcgtgctgtaggtggtatatacccgactgtgttaggtgttgtactggatggtttgaaaagcgagtatgttgatcggattactgcaagccttatactaaaaggtggtcagggaacaatgacagacttagctaaagaggaactttctacaaaaaatatagtgaaagttgaaaataaaaattggaattggagtaatgatactcgcaaagaaccgcgtttcgcaatattgacagtggataaagcacaagcggaaggaactgttattacactggatggtttaacttctttgatggataataatcaggatatgtttcaggtaacacaaggaaaagtaagagaaggactacctatgttgcgtgctgaagttagactgattggtaaagaaggattaactggagctgaaagagatgctcagcttgcagcatttagagagttgattttagatactaatagacagaatttctttattaaggtgaacggtggtaaagaaatacacatgaggggttatgcaccgacttctgcttacaaagcagaatatgaagcattggttgcgggtgacactacactggatgcaaatgtttattattcaaataccaaaggttccacttggggagttaaacttccggttggcacacgtcatgcttatgaacgtgtaccatttagagaagcatatcctgattttactaaatgggtagatagtaagggtgcttcaaaccagaaatggtatgagaactttgttgatgaaaaaactataagatattggtaatgcaaattatcagtcaatacgttatttgagatattttgtacaatttgaacccctcttttttcgaaaagaggggtttctttgtattcggaagaataatctttaaactaataccgtaatgacgaagcgattttttataggctacagtttgattactttttttctcttaaatagtgtggtgcttttggcacaacacaaagcttcctttgtgcagcaatggaaaatagaagatgcatcccatgctttgcagataatagaacgtgcagatacattagaattgatagttccggacggactgactatgtggtatcggcaacgattgacgggcgattatgaaataagttatcgtatttgtatggtgatgcaaggtggaaagtatgaccgcttgagtgatctgaactgcttctgggctgccaatgatcctaaataccctgatgatctttttgcccgtagtcagtggcgtgacggcatctttaaaaactataacacattaaaccttttctacgttggatacggaggaaatgataactcaacgacccgtttccgtcgatacaaaggagaatattatggagtggcagatgacaaggtgaaacctttattgaaagaatataccgatgcctctcatttactcgtccccaatcaatggtatgagattcggattcgagtggaaaagggaatcacaacttattctgtgaatgatgaagagttgttccgctatacccttgcgggtagtgaaggtgacggacacttcggtttacgtcttttgcagaatcacgtactctttacagattttaaagcgactatactttgacttatatactgaaaacctaataagactatatttccatgatgaaacaaccttttactaaatttggagtgacaactctgttttctcttttgtgttcagcattccttcatgcacaagttgtaacagatgaacggatgttttcttttgaagaaccgcaaataccggattgtatcaccgctacccattcccgcctgtcggtatctgatctgcattataaagatggaaaacattcgttggaatggacatttgaaccgggtggtatattggaactcaagaaagacctgaagtttgagaagaaagatccgaccggcaaggatttatatctttcggcttttattgtgtgggtttataatgaagttccccaagatacgaccattgagtttcagtttctgaaagacggcaaacgatgtacatctttcccttttggtattaatttcagtggttggcgtgccgcatgggtttgctatgaacgtgatatgcaaggcacaccggaagaaggcatgaatgaactccggattattgctccaaattcaaaaggaagccttttcatcgatcatttgattacggctactaaagttgatgcacgtcaacagacggccgatctgcaagttccttttgtcaatgccgggaccaccaaccattggctggttgtctatcaacactcgcttttgaaacctgatattgaattgactcctgtagacgataagcaaagagcagaaatgcaactgttggaaaagcgttttcgtgatatgatctacacgaaaggaaaaacgactgataaagaagtagaaaccatccgcaagaaatatgatttctatcagataacttacaagaacggccaagtatcgggagtacctatttacatggtacgtgcttcagaagcttatgaacggatcataccaaactgggataaagatatgctgactaaaatgggagtggaaatgcgtgcttatttcgacctgatgaaaagaattgccgttgcatataataatgcggcaaatccggtgattcgggaagaaatgaagaagaagttcttagcaatgtacgatcacataaccgatcagggggtagcttatggtagttgttggggaaatatccatcattatggctatagtgttcgcggtctgtacctggcatattttctgatgaaagatgtgcttagggaaactggaaaacttcaggaagccgaacggacattacgctggtatgcgattactaacgaagtataccctaaaccggaagtcaatggaattgatatggactctttcaatacacagaccaccggacgcattgccagcattttaatgatggaagatacaccggaaaaactacaatatctccggtctttctcccgttggattgattttggttgccgtcctgcattgggattatccggttcgtttaaagtagacggaggtgctttccatcatcgaaataactatccggcttatgctgtgggcggactcgatggagcaaccaatatgatttatcttttcagccggacggaatttgctgtttccgagttagctcatgaaacagtgaaaaatgtactgttgaccatgcgtttctattgcaataagctgaacttccctctttccatgtccggtcgtcatccggatggaaaaggtaaactggttcctatgcattttgctatgatggctttagccggttctcccgatggaaaggaggaatatgatagtgaaatggcttcttcttacctccgtctgatttcagacccaagtattgaaaatgactctcctgaatatatacctaaggtttcaaatactgaagaacgtaaggtggcaaaacttcttatagagaaaggtttccgtccggagccggacccgcagggaaatatagcgatgggatatggttgcgtctctgtccaacgtcgtagtaactggtcggctgtggcacgcggacattcccgttatctatgggcggcagagcattatctgggagcaaatctatacggtcgttacctggcacacggcagtttgcaaatattgactgctgcaccgggacagacagtaactcccgccactagcggctggcagcaggaaggttttgactggaaccgtattccgggagtgacatctattcatttgccattggagcaattgcaggctaaggtgctcaatgtggatagttactctggaatggaagagatgctttactccgacgaggcttttgccggtggtttgtctcaacagaagatgaatggtaatttcggaatgaagttacatgagcatgataagtacaacggatcacatcgggcacgtaaatcttaccatttcatcgatggaatgattgtctgtcttggttcggatattgaaaatacaaatacggagttcccgacagaaacgactatcttccaattggcagttactgataaagcagggcatgattattggaaaaattatcaaggagataagaaagtatgggtggaccatttgggaacgggttattatgttccaactcccatccggtttgagaagaactttcctcaatactcgcgaatgcaaaatacaggaaaggaaacaaagggtgattgggtttctttggttgtagatcatggaaaggcaccgaaaaacggaagttatgaatacgctgttctgcctcagacgaatgaaactctgatgaagaaatttgcaaagaagcccacttataaggtattacagcaagaccggaatgcacatattgtagagtccgtttccgaacagatcatttcttatgtgttgtttgaaactcctgaaacgacattgccgggtggtttattacaacgtgtggatacttcctgtctggttatgattcataaaggatctgctgataagattaagttgacggtggcacaaccggatttagctttgtatcgcggtccaagcgatgaagcgtttgataaagatgggaaacgcatcgaacgtagtatctattcacgaccatggattgaaaatgccagtagtgaaatacctgtgactgtaacgataaaagggcaatggaatgtagaagaaactccgttttgcaaggtgatttcttctgataagaagcaaacagttttgcagttcagttgtaaagatggtgctagctttgaagtggagttaaggagataaaagtcagacaataggagatcatttgcttttcctgataggggaacactagtttctcttggagaaaccatagtttccatgccgttgaaactattgtttctcggtgctgaaactacagtttcccaatgctgaaactttagtttcccggtacgaaacctttggtttcaagccttgaaactaaaagtttccccacgagaaacaaaggtaatgtactgtactggatttagttgacaacttcgcttgttatacctaagttagtttactcaatattttttaaaacctaaataagtttacttgtccctttgtaattcctgtataagttgtcatttaagatattttgcaaaattatgtatcttctcttataagtgcaagacttcgggctgtaaactttcattaaacaacaaaaactcttcgcttggggatcgccctagcggcaaccttagatttgcagcatcaaaatatttatctttgaattgatattgaaaggaaagcaaaaggaaaaccatcagcggcaatagaagtcaagtctaagtccctattcggtccttttgctccttccttgaactcaaacccatataagaatttcagtaaacctgtttaaggttattaggtcaagttcaggtcctttcttttttgtttaatgttcaaaaacaaaagtatgaaagttttttatttaggagttgatgtgagtaagaaaaaattggatttatgtttaaggagtaacggtaaggacatcctttatgatgttattcctaatgatctatcctctattaaatcttggttaacaagaacgtttgagaaatttttcctctctgaggacagtttggttgtctgtgcggaacatacagggcaatatacctatcctttggtctgtgcaacaaaaagtataggagtctacttatgtttggaagatgcagctaaaataaaatattgtcatggaatacctcgtggcaaaaatgataaaatagatgcctgccgaatagcaatgtatgcagaaagatataatgattgcctacaaccgtataccgcatcagagcttataatacaaaaactcaaaaacttatcaacagaacgcagtatgcttgttgcagatagggctaaatatcaatcccagctaaaagatcaggtagactatatggaacactcaatatatattgctaaatgcaatagagttgaagggattatcaatacatttacggattacatagcacaaatagaccttgaaataaaagaacttataaatcaggcacctgtcattgctcatcaaatggatttactcatgtctgtggatggagttggggaacgtgttgcactgaagatgatcatggaaacagatgctttcacttcttttactgatcccaggaagttttgctgtcatgcaggagttgttccgttcgtctatgtgtcaggaagtagccaacgttctaaaaatagagtatctaatagggctgacaagagcatcaagcatttgctacatatggcggcactatctgtttcacaagtgaaaaatagtccattgaagaaatattatgacagaaaggtcgaagagggaaaaaataagatgtcggttctgaatgcagttagagcgaaattagttacgattatgttcgctgtaattaggacggatgcttttttttcgagaaattatcaaaattcgcttgcgtaatccataagaataggggcgggagcacccgtcccgacgagcgggacttcaactacctttcccctgccgttacgaatatattccatcggtgttttcatttgtatgccttgatggggtcgaagataattgtatgcatatatggcatcggctatacgtttatccaactgttcaaagctatcatcttcgcagtcaaacagccacccattcttgatcgtgttattcatccgttcagccagggcattatgtagcggatctccacactgagtcatactaatattgatatgatgtttcttgagcatgcccacatacagttttgagcagtattgcactccccggtcagaatggtgtatgagactactcaaatcaacattgtatctgttgtaaaagtccatagccatcctaagtgcctttaagggaccttccgcttcaagtgttttgcacagtgcatatccgactatggcccgactgcccgcatcggtaagaagagacaggtaagcccatccctggcacgtggcaacataggttatgtccgctacaaccattgaaccgaatgtgtcagctacaaatttaggagtgacattcagcaagtccggataaatgtaataattatgattggaatttgttgtctttggtctcacatgcctgacacgttgacacaggccattagcacgaaaaatattatagcattgatcacgcccaatgaccatcctgacaccaaacttgcggaggcagcatgcatagagttcacgcataccagccttaggcataagcttacgtaactcagtacaatacagtacaatgcttgatgtgaggatatctatttccatttttctgttgacatgcttataataaccttgtctggttatgccgaagtaatcacagaggaactgcagactgccgcgcatatgacgggcagagttcccctgtgacaaggtgtcgattacttggcatcggagttttttcgaaccttgatgtgataggtggactccgcaagattaatcaattcctcacaagcttcatgacgaagactttcctcctgaagggcacgctgaagtttgcggttttcggcacgcaatgcagcgagttctttttccagttcattgagagactcatcagaggctttgcttaaagagggctgttctgtattcataactttatcatttatatgatacttttcgagccaaagaatcagcagacgtcggcaaataccggtacgcttagcaaactgatacttcgtttcggaagtcgataaatactcacgaatataagacattcgttcagattctgtgtaaggagtgtacttcttttttaattcttccatgtgaatttcgaatttgagaagtgtcaacttattcagtacactacagtttctggtgacagcattattgttgtcacactgctgtcacctattgctgtcacggtgttaattgttaataatcaaaccattaagcagcaatcggtgacagatatataattaaaataattgtatagagaggttagaacataaacatggcaacggcaacaatacggttgttacatacggcatgggtatcttgaattttcccattggacgtattgagcgaaccataccatgcagagcttaatgtatattccaacccgaatttccagtgggggacattgtaggtcagttctgctcctgccgtaactaattggttaaggtctgttcctgttccataaagttttgcatcatttcctttgggagcatatagtgcatcacttgttcccagattcttggcatagcctacgaagattcccggcttccatttctgtccgtagacaacgttgaaccaagagctggagaaacgtatcggagtatattcttgttctcccgtttgttcgttgacagacttgatcccgaatccacccaaaccggaagcttgtgtcagattggatcctaatacactcttcgcagcgatgaaccagtctttgttggtgtattttacatgagcttcgtatgaaagagttgtgatgcgttcgtctaccttgtatttatctgtatttactatagactccgtacgtggtttcaatgataacaactcaatgcctacgccggccagcaaaccgccattcttataatcagctccgacataaaattcaggaatacagctttgcttcagatacttatgtgttttcccttccggtccttgtgaagtatattgtgattgccacactgcggctccggtaagttggaaattcttgtttgtatagcgataacgaatttgtggcgcacggctgaagggctgaaacggtgctcctacggagagattaagaatctgcggagacacatctccgaataagggatgccagttctgtccgagtaataaagctgattttccccaatccagattcaaataagcatgacgaaggcgaatgaccgaataagaagtgcctgtgccgcggaagtcgacttctactttggcagatgtcttggctgttcccagttttggaccggcaacgtctactccaaggcgcgaatataaagtatagaagttactgttgggtgttgagttcaaatcgttcccctccggatcacgcactttgtcttttggatacatataaaacaatccgtctacggtttcttcgttagcacgactattataatagaagtcagtacgaatctgtccatagaatttgaacttgaaatcctgcatttgtgcgaaactgcctgatacggttatcagacaaagaaagattagaatgtattttttcataatgtgcatgtttgtaaacgggcgcaaaattacgtaaaattactggttatcagttcatcgttgattaaaaaaggcaaggattgcctgattatatttgttgagacttgtgcttttatgaattgctttcagtaattttctgtctgcttgcggcattaaatattcccagaaagttttcattttgttcagaagttgttcgtctcctccttccaactgttctgcatattgattgtatacgcatttgtgcatagattgcaatttttctctcatttcatcgaactcgagtgcacggttttgtctatactccaaagctaatgccgggttggcaagtaatccccgtcctatcataattccggctagtccgggaaactgttcctgaatgcggtgaatatcttctacactattgatatctccattatagatgagcggatgcttgcaggcattctgaaaagcctcaaacgctttaaggtcaacttctcctttgtattgctgttttcccaagcgggggtgcataaccacttgtcgcaagggtagctcattgataatcggagccagtttcagacattcttccggatcttcccagcccaacctcattttgatggagaaacttatttgcggatattctgtaatcaggctaagtaacgtctgaacttcttcgggataaggaagaatgccggaaccattgtggcgtttagctagcatgggaaaaggacatcccatattgatgtcgacttccttatatcccttttcaatgaatagggataagattttttctgctttttcaaaagaaggggctatcagttggggaatcagatgggctacctgattattcccggggtcgattccgcggacatctctatggcggaatccgcctttttcgagtcgtacaaatgaggtataataagtatctatacctccgaagcaggcagcatgagcattacggtaaaacacttcggtgtaaccttgtaatggggcaaaatgaataggaagagtctttggcattatttttatttttgtgcaaagatacagaaaaagtaaaagagaggaacctcgcggtccctctctttctgatgttaaattgattaaagtctgatttttataaacgttttctatgattgaaggttagaaaaattgggggatatatttttattctacaacgtttatagtcagttcacgtactacttgaccaccttgatggacgtagtttgcattgttggctacgaaagtagcggtatatgtaccggcctcttcataggtatgtgagtatatctccaacgactgcgagatattcttaatcgctacaccagcgtcaggattgcaggaaccattgagtaagagcggttcagagattagccaactattttttagtgtagctccggcagcagagctggatactattatttccgtcggtaaatttgttttccagaatccggggacaccgccatcaactgctccatactctctgtctttaactttgtccgattgctggtcactttcattatttacaatgtttagtggtgtgaaacctagattttttgcatagacagtttctgatttattattattaaaagccagttctatgcgtatattgttaaaggaaaatttaggttgtctaacagcaccatcctgaccgcctttgtaatggaaagcaatggtgatttgctttccaagataagaagctaagtctttagtgtatgaataggatttagtattgctttctactttcaccggcaattcttctgttggtattaaatatgtccagtcaaacccttctacaagtagcttatctgcttcgaaattattcttggccattcccggaaaattgtcggaaatgaaaatatctaatgcagtctgtggtgtatttttaggcggtgcatcatattgggcaaccatatcgaaattaatttcacatttttcgatatcctctatttgcatctctgtccgattgcggaatttatattcatggtcaatttctccactgaagaatgttataaaatcagggtcaccatcgaagctgaacgttaccggacttcctttctttacagtaacagttttgccatcgaagctgacattgctgtctgtcaccacaccaacttccattgctgtgtcttcttttaattccttgtcgcatgaagcgagacatagtccggcaaaagcgatagtcatcaaacttttatatattgtcttcatatccttttctttttaaagttaataagggatttaccaacccggattattcgttttgatagcactgttcgatcctatctcattggcaggaatcgggaaatagttgtaagacttcggaatattgaagtaagtatatacattggttccgaatttccaggattcgtcagcctgcgccttgtccacttgttcctgcatcagtttgtgatagtctccccagcggatcaggtcgaaacggcgtgtatattcgaagcagagttccatagcacgttcgtctttgatagccttacggaagccggtttcatccagatttgctgcaagcttgttgattcctgcacgttctcttaccgcattgatacattcataagccagatcattaggaccatggttgacttcattttcagcttctgcaatcatcagcagaatgtcagagtagcggagaagagggaagttgatggaagtatcgttcttgctcttcttgtctgcctcatattctctacgatatttggcagcagctctattgcggttcttattggcatcattcttcgattcgcgatcaccgtaagtagaaccgggctctgttttgccatagctgaaggattgattccaatattgttgttccacttcatctctttttcctttcacaaattcacgaccgtctaccggagtgccttctcctgctgactgggtgtaagtgaatggagcgatattccagttgcaacggtcaatatcaccgtttgcttcatacaattccagcagtttaggagtattccagataaaagcgtatgcataacccgggtcacctttaccggtgatggatgctttggaagaaaggtccttaccctgaataccgataatattaccaattctaccttctgcacgtacatccgttgaacggttacctgcaaattctacctcccagatactttcattagccttggcaccatccttattgagagcagtgttatacttatcagaacaaatgtcgataaagaaatcccaatatttagcagtcagtgaatgaccttcattcttaactagctgtgcatagtaactcgcttttttgaaatattctgtaatctcggcactagtcgtactgttggctaaacccacttccttgtcacgtttaggttcaccagctctgaacatatatgcacgtgccaacattccccaagctgccgatttggaaatacgtcccggcaaatagttcaaatcttgagcagatttgagatcttcggcagaaccatacatttctttgatgataaaatcataaatcgtctgtttgtccgtacgaggaatagagtggttataaacatcttctgtagaagtagtcttgaaaggtacatctccccaacattctaccaaagtgaaataatagaatgcgcgcaagaagcgagcttccgctttgtattgtttgcgggtatcatcgttcatatcgggcactgcatcaatattctccaggaaaatattggctctgttgacgccagcgtataatgtagaccatagtgccgctacagtaggatcacttgtgttggcattgttacagattaaaccgctcttattaggtccgcggttggcaccaccatagtgtcccaggtcgtcacctcctacaaggtataagaattcatttccgtaaaatgaactttgtcccagaatagcataggttcctgtcagccatgaagtagcttctgcttcatttttgaagaagttctcgggagtagtatatgtcgggtctttttccaggaaatcgcaggaagtcaggtttagtccgacaagaagtgatatgataattattcttattgttttcatatacgtaattgtttgaaggatgattgattagaaacctaggtttacaccaaaactaatagagtaggctctcggataagcggagaagtccagccccggagtcagtgcgccttcacggatagatacttccgggtcgtaaccagaatatcctgtacatgtccatagattctgaccggcaacgaatacacgtgcattgtctatcttccatttcttggtcagttgcttcggcagtgtatagcctaaagatactgttttcagacgaaggaaagaaccatcctcaataatacgtgtagagaatactttgttagaaccggagtcggtagctctcggaatattactttccgggttttctgttgtccaacggtctgcgtaacttgcatattggttcaagtcgcgtgtcttattactgttctcgaagaacaggcggttggcattcaatacatcgtttccatacgaccattggaagaagatgctcaagtcaaatcctttgtattcgaaattattggtaaatccacctgtatgtttcggcataccgttaccgatcatagtacggtcgttatcgtcgataataccgtcaccattcaagtctgcgtatttgggcatacccggttgcgtattactctcggaagagaaatatggaacattacgtttcaatgtataggtgtcacccaccttgtcgaagtcttcgtacttgtatgtaccttcatagatgaatccatacatcatccccatcggataacccactttggcgatgtagctgtattgtgagttatagttttggtcaaatttcgcagcagttggcatggatacttggttttctgccaatgccaatactttattcttgttaaaggctatattgaagttactggtccacgagaaattacggtttttaatgttggtagtattcaaggtgaactcaataccttggttgcgtaccttacctatattcttcatcgcactggtaaaaccggaagaaggagctgttgatgcattcagcagcaggtcgcgagtcgttttacgataccagtctatggtcaatccgatacgttcgtcaaggaagcccaagtccagacccagattccactgttcggtagtttcccatttcaactttctatttctcaaggaagtaggtaccatacctacgcttgtcagactgttctcaaacggatatacaccacttggagtactaccgactgaaataaagtctccgactttatctttcaacatttgatatagagcgtatgtatcatactcgcctacacggttgttaccggtcaatccccagcttgctcttaatttacctgaagaaacaactggtttcaatggtttcataaaatcttcttccatgaatccccaagccaatgagctggaagggaaataaccgaaacggttatcgccacggaacttggaagaaccgtcggaacggaaagaaaccgttgcataatacaatgatttatagttgtagttcaaacgtcccaggaaggaaagcatagaccaggaactctttaatgatttggtcgtactcggagttccttcactcattcctgccattccgagtgcttcgtttggaatttgcactgttttgtatgaatagtattcatagtcggaattttgcagggttacacctgccatactattaaagaaatgcttccgtttgatattggtctgataggtcagaatgttttcgtttaaccatgttgcacgttgagaatggtagatttctgcatttaccttatcggatgatttcggattaccatagcgggtcttcgagttgttgaatgtttcccctttgcgggtatcgaacgtgtaaccgccggaaactttcaacttcaatcctttgataaattcatattctgcaaatccgttgaactggatatagttcgcgtacgtcttacgatattcgtttttcaaagacatgatagggttgaaacgatagtcgttggtattgtttatcgcatcgtccataatattgtccatcaacgagtttaatggtctgtccggttctgtcacagggcgatatccccatacgctatagaacaggttattcataccactgtatgagttctgagaaggagaaccaccggtagttgtagtgcttgaatagttggttgtcagatagattttcagtttcttcttttgaatggtagtacccatacggccttgtatacgcttgtagtttgattccaacaagataccgtcctggtcataataagataaagaagcgttgtaacgaactccttccgaaccaccggtcaggctgacattgtggctttgcatccatgcactgcggaagatttcatcctgccagttatattgcgggatatttctataatcttccagtccccatttcttgccgtcataattcatgaagtaagtagtttccatatctttgggactacgttctgcctgtagtttgacgaattcataggcatccatcatcgggattgttttggtgatatgctgaataccgaaacttccgtcatatttaattttaggttggccgattgttcctttcttggttgtaatcatcacgacaccgttggcaccacgggcaccgtagatagcagtagcagaggcatccttcaggaagtcgagtgactcgatatcattctgattgatggctgcggctatggaggggtcttccaccgggaaaccgtcaatgacataaagaggagagttgtcctgtgtcaaagagttgttaccacggatgacgatgttcatctgtccgcccggcataccttcgcccgaacttacgttgacaccggcaatacgtccgcccaatgtctcgccgaaagaagcagtcggagtgctaagtagttccgccatactggctttggcaacagagccagtcagatccttcttgcgtatctcctgatagccgactactaccacttcgtccaatgtctttgtgtcttcctttaatgtgataaccattggcttttgagtgtccaccttcatttctactgtgacataaccaatgaaagaaataaccaatatcgaatttttattgggcacgttaaaagcaaatttaccgtcaaggtcagtgattgttccttgcgaagtaccttttacctggacactggctcccggcactccttctcctaagttatccttcactgtacctttaacaagtacctgtgcaagtacaaaagaaacagaaaacaggatcagtccgatggaggagagcatcctttttctagtttgagtggataaatgttttttcatatattaaaaattaagtgattttattgaatctacgcttgcaaagatagacggattgaatattctaatatggatagaattattcaagattggtgcaaaatcatacaatttttctgttctcataaactatttttcttttacggattctagtaattcagataattctttcactatgtcggggtattgttttgatacattcgttttctccgatggatcggaggataaatcgtaaagttgaggctgtttgtcgttgcctaactccattttcgtccaatgttcgatggcggggccgtcgctcggttcgatgtatttccattgaccttttatgatggcaagtgtgttattgagattctgttgaacgacatactcacggtttgtattatttttgccgaggagtacgttcagatgttcttgactatcgggagcagctcctttacgtaaaggttggtccaaaagggaggcgagcgatgcatacacatctatttgagagaaaagagcttgttgcttgttcggctttacccgggcaggccagcggacgataaatggaacgcgtgtccccgcttcgtaagcactgtatttcccaccacggtagatccccatcggagtatgcccgttgagaagttcgtaagcttggtcttgatagccgtcgtcgataacaggaccgttatcgctggtaaagatcaggatagtgttgtctgcgatgtggaggctatccagtgtgtgcatgatttcaccgatggtccagtccagttgcaggatgacgtcgccacgagtgccgagcccgcttttgcctgcgaaacgtgggtgggggatgcgtggtacatgtacgtcttgcgtacccatatataagaagaaaggttcttcctgatgggatgcaatgaaattcttagccttatgagtgatgatatcggctatgtcttcatctttccaaagggcggattttcctccggtcatccagccgatacgaggaatgccgttgatgattgtattgttgtgtccctgactgggctttaaagtgacgagctccggattctcttctcccgtaggccagtcgcctactttgtggtcgtagcttacggtgataggatcattggggtcaagtcctacaacatgtccgttttctacaaatacacaaggtacacggtctacggtagccggaataataaattcgtagtcaaaaccgatgctttgtgcgttaggggtaatccggttgttaaagtcggttccacctttcggaccgagtcccagatgccatttgcctactgcaccggttgcgtatcctgcatctttcagcatatctgccatggtgacgcaggtagtgtcgataatgagttcggagttgccgggagcgattcctgtgttttcctgtctccagggatacatgcctgtcaggagcccgaaacgggaaggggtgctggtggcagaagttgcatacgcattggtgaattgtactccttgtcctgccaaccggtcgatgttgggagtgctcacttttgttgctccataacaacttaaatcaccaatgccgagatcatctgcaaatatataaataatgttaggcttttggttgttctgcccattgctcttttggggtgcatgattgcatcctgacagcgtgacgatgccggacaataggggaagtagacgcgaaacgtttttcataatgctgaatgttttaggaaataatgtaatgaacacaaagataagcgaatggaagaaaaagaatgagtaggaatgtacaagtgaagtacaaaatagtacacttaagaagttaccttctttattcgggcgaagatgtccggactaagaaaccgtttatatcataaatttaggcacggattacacggattaacgctgttgttttcatactcatcgttttttaatccgtgaaatccgtgtgatccgtgcctaataatataagattattttgcaagagtgcttgtatagttgcctgctaatctgtttcttctccgtccccttcttcttcgctctcttctcctttacgataagccagcggactgacgtgataaatctccttgaaacatttactgaaatagcgggaggaggagaacccaatccggtcagagatctccgtgatattcagctccgggttattccttaacatgacagcgccttttttgagacgtatgcttaggatgaaatcattcggggtctggcctgtaactgctttcagtttagtgaataggttcgtacgtgccatacccatttcgcgggcgaagatattaacgttgaaatccgtattgtccagatgacgttcgataatggccatcgcgcggtcgagcatctccttatccatcgggttggtagccaacatttgggcaaaagcctgtggttgtttgctgaacttctcttgcaatagccggcgggaattaaccaggttattgcagcgggaaatcagaagattggtattaaacggtttcgtgatataatcatccgcaccaatcttcaaaccttcgatattgtgctctatagcagtacgtgcggttaataataccaccggaatatggcaagtgttaaagtccgtcttgatctgtttgcaaagttccgtacccgacatgcgtggcattacgacatcacttaaaatgatgctcggcatatccttctgtatcatctctaatgcttctactccgtcggaagccgtactgacttgatagaatgtttcgaaaataccgactaacatctgtttgatagattcattgtcttccactatcagcattttggcgtcttcgatgcgcttgttatcttcttctttccattccgaatcagggattatttctactgaaggaacaatagtctctgtttgctggatggtttccgtatcatctttcgctatttgctcttctgtgaagtgttccttgcctagtttgagggtgataatgaaactgcttcctttgcccggttcgctttctacccggattgtgccgtgatgaagttccacaataccttttgtcagtgccagtccgatgcctgtaccggctccggtattcagcgagttgagatgttcggtctgatagaaacggtcgaatatcttatcaatttcggcagcggcgatacctgtcccggtatcttttatttcaatgatgacatggtctttctcctgcgatacattaatcgaaattgtatcttcggccttggtatgcttcactgcattagacagcaggttgtttattactttctgcatctgcttttggtcataccatacttcaatgtcatccttctgtttgttgaacttgaagttgatttgtttactgctcgcatattcgaggaagagcagataattctcatacaggaagttaaccagattgtgctggctaactttgatcttcatgtgaccctgttcctgtttacgaaaatcaagtagttccgtaatcagttcccgtaattggagactgtttttgtagattcccaacaccttattatatatgttaggcgtaaatgtctgcacctgcagcaaagtttccacttgtcccacaatcagcgttaacggtgtgcggaattcatgtgagatgttagtgaagaaacggagtttcgactggttcaatgcttcgaggtcttcaatatgcttcttttcgtacttcaaagactcacggagtttgatgcgcgaattatagttctgaataagataccataacaagctgatagtgacaatggtataaagcaggtaagcccaccatgtttcataccatgaagggagtacgataatcagcaatctggcctcttttattccttccctctgtgatttgatgacaagggtatatttacccggattcaggtttgtataagtaatcagcgtttgcttccggtaagtatggttccattcatctgagaaaccctccaggcgatagagaatttcatctctgttggcagggatgaagttggaagtggcatattcgatgctaaacatcgattgattcgctttcagactgatttccggagtatgacagatcgacagttccaggataccgctttcatctcccgggactacttcttttccgttgacaagcaggcgggaaagaatgatattatacgatttgggagtgaaatgtaatttcttctcccagaaagaaatcattccctgaataccgccaaggaatacttctccgtcatgtgtcacaaatagtgcgttttcattgacggcggtcaacgggaatccgttttccgtaccgtaattatagaatttcttgcttggatagtcgaactgtgagaagccttgattggtaatcagcaataagtcacctttctgtatggacgattcgcatacttcgtagatacagtcactggatagaccatctgtctgtacatcgaagttttcaaagtcatcacttgccttacggtaacggtcgagaccgcttccggaggtgcagaaccatagattaccgttactgtcctgcatgatactgttgatattattgttgctaagactgttcggattagcgggattgtgcggataattagtaagtttaccgctgtcgaaccggtaagaataaacaccctctccggtagccgcaatccacaatgtaccgtctttatcaatgcaaagactggctaccatgccaatacctcgtccttctttagtctctttgaagagttgttggcaagtgcctgttgccggattgaaaagacaaacaccgttttgtgtggcgacaaccagcttgtccttataaggtacaatgtctcggacgatatccgaaggtagtgaggttgggtctccggctttcatccggtagactgtgaaacggttggtacgcaggtcgagtttgttcaatcctcccaagtgtgtacctatccacatgatttcattagtccggtcgtagtagattgctttgacattgttatgggaaatgctatttttgccctcttcgtggcgataccaccgataggtgttgtttttccggtcgtacacattcacgccaccgccttcagtacaaatccataagtttccgtctttatcttcagtcattctgccaacaatcgggctacttaaaccttctttttctgtatctcccgtcttgtagcgggtatagatttcatattccggattgaaatagttgacacctccgaaataagtacccagccaaattgttccttgttcatctttgacgatgcaccagatggaggagtgggtaagtccgtcgggtttgttcgcgttggcagtgtaaagttggaatttacctgtgctcttttcatagcgatttaacccgtgaaaggttcctatccacagatttcctgcattatcttcacagcaactccttacgaagtcggtgcaaatactgtttggatttttaggatcatgacggaagttctcaatggtactatctgtttttatccggtagagtccttcttcccaggtacagatccataattctttagacgaatcttcgtaaatactcgcgatattacctcttgtgacaggttgggaaatctttttgtctcccgataaacagtaaagtccgttactggtagttcccatccacagatttttcttttcgtccaggtggagacaggagagggtgatatcttttccggcaagatgatagtagagatcgaagtttccggtactttcattatatacaaacacttcttctcttttcccgatatataatttctcgttgaaataaatagcatccacattgccttgcagcaacgttttgaatctttgtgtggtcagatcgaactctgctaccccgtccgtacagagcaggtataccttcccgtttttgtttccggtgatacgcagcactgtattgctgaacaaactgttcggatcgtttttattaagtttgaaacttttgatatcgttaccgttataccggttcagtccttcacgcgtgccaatccatataatcccccgttcatcaatataaaggctattgacagaaaattgggagagtccgtcgtccgtggtcaagtggctaaaagtgatgttttgaccttgtgtgcggactccagctacgcttaaaaatagcagaaataaaagaattacttttctcactaatttattttttaaggtgtttacatctatgcaaatatattgtttttattcgatttcagtgaatcttattagaagaaagtaactataaaacaccggaagagaattctatttaacagaattactcttccggtttctaacctaactaacctcttgttatagtgtttgtgcctgtttcgtttttatcagttcagattattaccacactacatactgattgaaaaaacgagtactttcagcaatccatgagtccatgttctcataagctgcaaagtgtcctgatgtagggtaacatatccagcgtttaggtgtacggatgtgattgtatgctgcaaaatttgtatgtggtggtgtaatgttgtcctgaagtccgaatcccattaatactgggcatttgatccatccggtcagattcttcaagtcaaagtaagttagtaatgagaatattttatctttgtcaatattctgccgggcagctccttcgaataccaagttggcaggccagtgaaccaaacggaaataatcgggatagtctgacagaaagggtacgataggcgcagctgcggaaatacgatggtcgagtgacgctgctgctaatgtgagcgctccaccttgcgaaatacctgtagcaaaaaggttttgtccgtcaaagcatggctgagcaaaaataaaatcaatactgcggactgtatcagcaaaagcacctctgtaatagtaatgtttgggtgaatccagtccgaaagcaatccactcaccaaagcggttataaggtttgttgaggccttgtccacggggtggaatgaccaagatacaccaaccgggatagtcgtcgggactgggaatccaggtgacggcatcataaccttgataaaccactacggccggatgactctgaccatctgtagggactgcccaatacccccgtaagatttctccttcaagcgagcgcatttctacttcgtaaacatcacgctctggcttcgaagattcaggtagacgtgtcattttataggcagggtgtacacgtttaagttcggtgatggttttattccaaaatctttttaagttagggggaccatccggtttggataaaatctgttcggcttcgtatccaaagaagaaatgtttcagagtgtcggtgccggcaatgaaacaaacctggtaaaatccgggagtgagattcgtgagagtgactgatgcacgactgcgaaagcctccaccgggagctatcgaatctgttccgaaagagtaggttataaaggtagacgatacagcattgccgaaatctgttgcaatgtccatgcgtatcctatccgaaaaacctgactgtgcagatgtcaattccagcatgaagcgtactggatgttcgttatcgaacatccagttttgctcaacaggaatattgagatttatggtctcctgtgtataacttcttattgagtatccggtcaggagtataatgacgtatatccacttttgcatcctgttaatcattgtaattactctttgatataaaacgtaatcagcactcctttatgatcgcttggccactgattgtttacgggcggaatgattggatctttggtttgttcttctattctttgtccgcgtacaatagagcctgttggacctactatctgggcactttttatttgtagatttttatttggataatagtaaacgaaatcaattcgttcgcgttcatctgcctccggtgcccatgagagattctctggaatgactgatttattgtctgctggaaaagtgaatcccggacatttcaccggatcgggatgaattacccggtaggcatctttatatccccgttgaaccaacaatttggaagttccccaattgacgatacatccgcgatgatcgaatagatcttttgtatcggcctgccaatccagataagaaggctcattcagatctccggcaaaaaacacgagtgctccttgctctagctctttggcagcgttgttgataaaagcttgggcggattctatacggtctgattcttcgcagacagcaagtatcttgtttacatcagtgataggagccggaagtttatcccaattaacgctaccgtcattgtatccccggggatagtaacaggtgtagtaacgatactctgaatgtgccgggtaaacggccactcgtttcccattgacatccagaatcgctttgaacatccatttgttgatgcgttctgtctctttgatcggatattttgatatgaccgctcttccgtctattcgtgcatcgtaatagatgagtcccttatctttaagcccttgcattagtttaggcatcacgggatcgtcttgtggacctttatataattcgcaaaatgtagcaatgtctggctgtagggtagcaatctgttctatcagatattccggagcatgctccaccttggtacactccacccataagttgagttgaaggaacttaatctctgttttctttcctgtttcttcttccggtacagatacttccgtatcggttttagaacatgcagtgataacaggaagtatggcaataataatagttaataaccacttttgcataatctgtattttttagatttgattaccagcccggattctgacagttagttcctgaagcattctgtaaccggattgcttcgtcacccggtattggatataataagaatttttcactatatgcttttcggttattatctactacaaaacgggagtaacttccatctgagtttgctttcattccggtgattactttatctgtttgatccagtatcttccaacggcgtacatcaaagaagcggtgttcttcaaaagcaagttctacgcgtctttcgttcctgattcgcagacgaaactgatcacaggataatccgtaaggaatgcctggcatacctactctggaacgtactgcattgactgcgtctaccgcatcattgggtacagttccggtagtggatgcttcattagctgcctctgcataattcaaatataattcagccaggcggaactctttgaagtagccatccagattgccggaacgtccggatttataatgcgagaacttacgtgtataatagccggtacaggtgtaacgtgcattactgggatcaagtgcacagtttcctcctgtcttggttgagagtagtgcaccggtttccaggtttagtttggaaccatcataataaatagaagctttaagacgcggatcacggttctcatacggtttggcttgattgtagagaccttgaacagccgaattcaagttaggctgcagatgattggcatctagataagggctctctaaattgagcagaggataagattctgtcatgtcaccgttcacaacttcataggcatcaagtagctcttgcgacggacacgcaccggcatctgtctggccgtcggtagttggcaggccagcataattccacatatacatttgtccaacttccataatggtttctttgtcattaactaccggcaagtcagtgcgcgaatagaaatacacatcataaggagaataaccagctgtagcattcggctgtttcttataaagttcataattgttcgccagacagtcatccagagactttttagtaatttctgcggcttctgtccaagtgattgttccgtcattgtacagaggactggctgcatagagtgatatctgtgaacggatggctgcacagatggcttttgtcataacgtgacggtagttctccttatctaaggaacgccatccccattcttcaacagtgggaatatcaatagcagcctgacaatcagctaatatttggcgggcacactcgccaaatgtacctcttttaaccttggtataatcgtagtcgggagctgttatgatgggaacacctccataacgtttcaccaattgaagataatagaaagcgcgtaatgtaagtacctgtgccttgaaactgttacgtatatcttccgagtagacactggcagtagggatattggcaagaaagatgttgcaggcacgaatcccttgataataataattgtagttttccggatttccttcgatgccctccagcggattgctgaagggagataattgtccttcattccatttgcgggtaactccgttctgtagttcccaggaatctttggcttcatccgtacaaccagctagcatggtatagttatagttcattccgtaattcagaatccatccataacattgattcatataagtatacgttttacggttcgtggtaaacaaatcgctgtaatccgtacggccgtccggatgatcttcaatttcagtacatcctatgaatgaggataatatgagtaaggagaatactcctgatatgattttatttattttcataacttcagtctttagaaattcaggttaagtcctatgttaaatgttctgtaaatggggtatacagagtaggaatattgttccgggtccagattatcgaacttgagagatgaggtggtcaacaaattggctccgctgatatagaatctcattttctccagtttcagcttactgctccaacgtttaggaagtgtataacctaatactacattcttcaatctcatatagttatttttggaatagaagaattcattcgattggagacttgaagagcttcctgtggtcaaagccggatagctgattttttcatttgccgcatagcgatctgctgtccaggcattacggtgcaggtctgtgtacactccttggtaagcattatcgaagataccgcatccactgtaataggctgctgtacctgatacaccttgtaactgaacatacaagtcaaagtttttgtattccagttgaatagaaccaccataagaaagtgtaggtagtgtctgggctttgtccatcggtgcctggtcacgctcatctatatttccgtcgttatttaagtctttgtaaatgaaatcacctgggcgcggagaagcaccagagaatcgcagaccgcttttatctatttcctcctggctattatagtagccgtttccgttggaatagtcaatcagatatccgaactgttgtcctgcagaatagccggttttacgatatggatagtaatatccgctggcggtacggttcaactcttttatgtcagttacttcatttttattgtatcccatattccctctgatagtcattcttaatccacatttcagattcttgatataagatagttcaagatcaaatcctttgttgttcatcttacccagattttcaaatggcagattttcactggcgataccttgtgcagaagatacactgttattttggatagccatttgggtctgtttcacgttccaataatcaaatgtgatacctagtgagttgaataaggtaacatctattccgtaattttgctggaaagattcttcataatggatatacggattaccttgcataccttctacagtatgaaagccatagtagttgcttagtaagtaacctgcatctttataacgtacatctgtagcatacaggaaacgggtgtcagatatctggtcattgcccagccagccggcagatgcgcgtattttgaggaaggacaaccaatctgtgtctttcaggaaactttcgttggataccacccaagcggcagatactgtcgggaagaatttaaaacggttacccggtttgaactgttctgtgccatcataggtaaagtctccctgtatatagtaccgtgaatcatagccgtatttcacatgtcccatcaatgacaaacgatcgtatgggagatcaccgtttttcatcatattctcattgaaatagctgacaaatgcatctacttcatgtttgcctccaaaaatacgattatagttgatgaacccttggaagttgataaagtagcgcatattagcggtcttgcttaaacttagaggaagagtggtgtgagtaccgaaaagtccgctgccattggctgcataacgtgcgtagtcagtagaaccatagattgttccgtcatagtttgcttcataacctactattccttttacgctcaatcctttaatcaggaatcccagatccagattcattccataagcgacgttcagattgatacctgtttgatggctatatccggagcggttgataagtccgtaagtaggatattcattgtattctgcagtaatcacttttccgtcttcggtgataggtccaggtacggtgggggccatctgatagatcgaattcatgatatctcctgtcccgttgtatccttgatttatccggtcgatagtgacatttgtgttaaggaaacagtttagataacgatgcagagtgacgtccacattagctaaaatgttgaagcgatgcaatttgagtgcaggattataattatcattcttctctgcatcaatcaggctgttttggtgaagataaccggcattaacaaggtatttaacccggttgttacctccgctgatatttacgttgtaacgttgcatactggctgcatcattcatgaaagtgtcataccagtcgtgtcccggcatagttccatctgtaaacccggctatttcatataaagaatagagtggagtgccaccgtcattgagtaaggcctggttacgcatttgtgcgtattcaccggtacttactattttaggacgctgggtagcctgttgtatggagaagtccatgttcacatttactttagtacgtcctatttcgcctctttttgtagtaataagaattactccggaagaagctcgcggaccatataatgctttagctgcggcatctttcagaatactgacagattctacagtgttggcatcgagtgtattcatatcgaataatggagccggaattccatcgagtacaaccaaaggtgaattaccgtttatggaattcagaccacgtatatacatcgttgttgcatcatcggctggtgtgctggtggattggatagaagtcaatcctgccaagcgtccggtcagcgtagctgaaaatccgctattaggtgttttaactaactcttctccctgaacggtagagattgctcctgtataacctccttttctctctttctgcagcatggctacttcgagagatgtatcctgaccggcgatgtctgatatcagacaaaactctaccggtttattcagagtgaatttcattgtctggttccgatatcccggaatcttacaaatgaccatactggctcccgacggaatctccatgatgaattttccgtctttatcactgcttgtggtgtattcgggattgtccgggacagaaatgattgcgccgtctaaaggttcgttgctctcattccgcaccacaccggatataacttcttgcacttgtgcccggcatacttcattgcctgtgaacaggcatacgatgcacaaaagtgtgattattctgtttttcatatacattctgttttatgattaccatcctgcattttgccacgtctgtcctgtcgtgccttccaatacggctgcttcattggcagggataggatatacgtgccatttcttttcataactcattttgctcggtttgctgccgtctgttcctagattgattctttcataagagaatgagtttccatttttggtgattctcatacctgtggtaaacttctcattttccatattctcattggcgggtgtccaacggcggatatcgaaatatctgtcttcttcacaagccagctctatctggcgttcgtggcgtaccaataaacgagcttcgttcttgtcgtttgtcgacagatcaaccgaaggatcaaaacctgcgcgatgacggatttcattgatccattccaggccttcggtaaggtgtccgctttcaatagcggcttcggcggcattcagataaattttgcctaatcggtaaaaacggaaacggccatcatatccagccactccggctgccttacagttaccgtttaccattctttttctccaataataaccggtacgtgtattcgtatttccacttgtacggatttcgctatttcctcccacgtacgtttctactactgccggttcctttcctaacagcacaggactgttattataaaaaattgtagcctggaaacgaggatcacgtcccttataagggttggctgggtcataaccgctattagggttataattaggtgacagatgcttctcatcgttataaggtttcgataaatccagtacaggctttcctgttgctagcatatcataggcgtctactaattcttgggaaggaacaatagttaattgagcgtttcccaataccggagctccgataacgtcatacaaaggattggtgtatgggtcgggccaatagccttcggtactttgccagattgtttctttatcactgggatctgttccgatatagttattgagcgtaaagtactccatataagcattgttatagtacttttcagtatccgcacatttagtatacaattcatatccattggctttcagctgttccagacagtctttgttgattgtgtaagcccattcccaaagatctttgccgccattgttgtaagtgctggctgcgaatagagatgcttcggaacggatagccattgcgatacctttggtcattctgatcttctcgttgagtgttgtcagtcgccaagggaggttgctggattgcaaagctatttcgcaatcatctacaatgaatcgggcacagtcttcgaaagtaggacgtgatagagttgaataatcatagtctaacccgtatggctctttctcaataggcacaggaccataccatttcagtaactccatatagaaataagcacggagtacatgagcctctgctacccaacggtcacggtcgctttcgcttggtatggcggcggtggctgcccgttggaggaatgtgttgataatacggatttgcccccagtataactgccagtatcctccttctgagtaggtgtcacccatatctctgcgaacgtcgagatagaagtcggtggtggtacagttgccggatgcggcatgtgcaaagccggcaccggaaccatccgtgcaatcccacgcttcatcactaagtgctacgggatagttgctccagaaatgatatcgtaaactctttttaggcagatagtcaaagcaagtactgaaataagctttagtcagatcgggatcttggaatacttcgtccagtgataatcttccgtcgggagctacatccaacgcttcattacaagaactgaatgtgagcaaggaagcaaacatgcatatataaataaatctttttttcatattggttttgttttagccgttaaaatgtaatatttaaacctacattgtacgtacgcattgttggataggctgccggactgttttgctcgggatcgaagctgtcagtcttcaggtgagtccatgtatacaagttgttaccacttaaatagaaacgtacattggaagcaccgattttcttgctgatgctttccggtaatgtatatcctacttctgcatttttcagacgtatatatgaggcatccatgataaagaagtcgttgggctgcaagctcgggccgccactgctggacagacgaggatacgtaatcttttcgtgattattatagcgttcttcgctccaacgttccatgtgcatcttgtaaaagttgccgctgctttcataaataccggctcctgaataagtcttgctgtattggcctactccctgcaacatgatagaaacatcgaatcctttccagttggcagataaagagaaaccgtagttgatgcgaggcaatagggaggaatagccaatgggagccttgtcacggtcattgatgacaccgtctccgttgagatctttataaataaagtctccgggttccggtgttcctacaccttcataagtcagtccgctcttggcaatactctcgtcgctatagaagaatcctgtgccgtcacgccctttttcaggatcatagctgtggtcgatgatatatccccagttttgtcctaatgagaagccggtggtgcgggtgcgataagcataatccttacctaatagtggctcgtcatattccaatactttgtttttggcataactgaagtttgcattagcagaaacagatagcccgtttttgaattgtttctgatatccgaggaccatttcgaatccctgattctttacttcaccatcgttcatcagtggaagagcggatgagggaagaccttgaatcataggagtagtctgcgggataatcagaatattttttcttttttcaacaaagtagtcaaatgagaaggaaagatcatgatacaaggatatgtctataccataattctgtttttcagctgtttcccatgtgatgcttttgtttcctatgtagttttcggctatcttgtaaccttgtccccaaccggaaccattggaagcatatcccaagcttggggataaccaatgatctcctttactgtcggtgactacggaatattgactgatattatccagataaaggaaacgggctgaaccgaaggcgtcgttaccaacttttccccaagaagctcttaacttcagattggtcaaaaccggattatcctgaaggaagccctcattagtaatcagccaaccgaaagaggcagccgggaagagaccaaatcgtttgtccggtgaaaattgttcagagccgttataacctacgttgacctccgcaaaataacgtctgtcatagtcataagttgcacgtccggcaataccgatgacgttgtaaggaagcagtaggtcaccggatgtttctttggattctttgatgtcccgttgagctagaaacatagcagtgacattatgctttccggcgaaggtctggttatagttgatttgtccctgtaagttcataacccaataagattcggaagactttgtgagttcaatcgggccgtcttcgtcctccaggctaggatggcgattgataaacaaatgctctcctgaagctaatgtctgatacgtataccaggtataggaacgttttccgattgttttcccaaatcctttggagtcgaaagatacctggcctttgacagagagccctttagtgataaatcccaaatctatttctactcctccgataacattgattcccgatctggtttccagttgatagcccgaacggttgattagcggatatgcactcaatgaattgttggcgggatcttctacggataatccggcaccaatagggaaagtacgtatagcatcagtagcgtatgcaccttccggggtgagatacatggaagtagggcgtgaggtcaaagcgctgttgaatacacttgacatacttgcggaggttccgttgatccgttccagataagaggaagcgtttaagttaatctttaccgacttattgactttgtagtcgatatttgagcggaagttgtagcggtctaatgaagactgggcattgtatcccaacttggatttaggttctacgttgaacatacctccctgatgcagatagcctgcacttacaaagtattgaagtttgtccgaacctcccgaaacgttcatgttggctctggtcatgggagcataatctctgaacaagatatcttgccagttattattcggataaaaatctgggtctacaggattacctgttttccatgagtcgaacttatcaatgtccggcccgaggaattcagcggaatttccgtcgttcacgagtgcttcattgcgaagtctgacccagtcccatgaatccagacgttcgggcttgaaagcgatttcctgcatgctgaattctacattggcactgatacgggcagttcctttttcacctctacgagtggtaatcattatcactccgttggcaccacgtactccgaatactgctgttgcggaagcatctttcaatacggagatattagcaatctcgttcgggtcgatagatcgcatatcgtctacagctactccatctaccataattaatgggtttgttccgtttgtagtggcagcaccacgcaggaacatggtgacttcgtcacgtcccggttcaccggaggtctggatagttgtcaatcctgggagttttccggataaagcggaacttaggttgggcgatgaggatttcatcaaatcttttcgatcaatggaagctacggaaccgatgacagaaacctttttctgggtaccgtaagctaccactacaacttcctccaggttcgctacgtccggatgcatgatgatacgcatgtcttttttagcaggaatgtcctgcttttgataacctacataactgatttccagtatagcgttgggggcaaccgataaagagaaacgaccgtctatgtctgtaatagtaccattcgttgctgctcctttttctatgacggaagctccgatcaggctttcaccggactcgtctacgacgactccagaggctgttattttagactgttgctgtgtcagggtagcatctccgatatccgatgcatttcctgtaacgggaatacagattcccaacccaagcaacaggcacattttgtatagccaataactttttttcataactataacgtttaagattgttttctgtctaattaaatgaactcaacattttatccttgtcgtatcctatgtattcatagcgttctatccggacaccttgattctttgcggtaatacatgggcttgtgccattccatgggctatccatccaccattcttctactagtagcttcctttgagttgaagagctgtcggtaaatgagaactgaacttttgaggcatctacagctccaccggagtaacctagtacggaataagtacctgccagattacgcagatcaacataagtgagcggacaaccggatgcatttagtgatgtgatggatttgcaccggtttatatccagatatgctaatcccggattgttgctcacatctatagaggttatcatatactgatcgccagaaatgaatttggttaatcctgcattcttggcactgaaagtctgaattcctttctcatctaccggacctgccgtgtagctggtactgattgcgtatttactaagatcgatttctcccagattatttccatccagaatgaggtttttgtatccgcagaagtattgtagtccttccagattagtgattcccttattgctaagatcaagggtcgtgttattcttgaagtattcagtattcagagcagccactgtcagaactttatctccatcgaatacatccggaaccaatgctttgagtgcgtttcgcagattgatatcaggaatttctccgtactttttcattgtcttctgatattttccgtaactgtaataatagttgttgtttccatcgggatagtcgtgcatccagtcgtacccttccactgtcactccattattgatggcatctacgatagaaccgctattgctgtagtatgagtccatccaccaggattccattttcaggagtcgttctttacttgcgtcatcgctgaaagtaaatttgaagtctgtgctgttgtagttcagacatccgccatagatactgtggtaattgcgtacatccagatataccagtttacagtttagagcagagaacttctcaatgttataacaataatacaggtcgacagattctagtttggtacttccatctatgttgagagataccaatgtcgtgttcggctgttccgaagtggctagttccagtttggtcagaccagtgttttgtgcagtcagttcagacagtctggatagtacttctgcaggaatttcactgatatcattattgttgcagatcagtttccgaatgttgctgaaatattcgagtccctccagagaagtgatatttttatcgctgatatttagtgtgccatcagtgaaagtgacatatttagcactggaagatatcttttctcctttaaatatatcagggaaaagagcagacaaggcattacgcaggttttcgtcgggcataactccaacagtactgttgatgacgcctaatgttcgcattttgctaccgcgtaccaatacaagtccataagaatctttggtggccgtagaggggtaaagtaccgtgatatgatcggatgctacttctctggtttccatgtagatgggctgttcggttcctcctgaaaggggagaaagagccagtacatcacagtcgataaagccatttccctgaatggtaatctctgtgcccagggattcttccgaaatatccggaagcactacattggttactcctaggtctgtgcctaacttttcgtcttcacatcccaaaaggaataccattccaagcattaataaaatgtagaaatgtgttttcataaatactatttgtttaatgaataaatagagtacatagttattcttgttttaagacgatcacagaatgagccggaagtaaacatagaattttatcgttcactttgagaggctgggcgtccggagccaacatttggtctgtggtaggtaaaccgtctttgatataacggtaaacctgataattccctttggtttgcgtatgttggttgatgaggcttattgctttctcctggtccattccattggcgaaaacatatacccatttgccatttgtgtttcgaacagcagttcctgcataccattcttccggtgttgctatcggatagatttcagctcccgggcgtatgaaacgtgtcaacagagaataggcatagtactgtgggcgtacctcgtaatcacttttgatatcgttgtagtatggttccgaagcgtatgttttctttacatacttccataaacccagttgctgcattgctccgtagtctgcatccttaccatagtattggtctatcaggctccaatagctaacaccgcttgctcctgcattgagtagattgatggctatgcgtgtcatgagtactcctcgttcatacaagtcgatatctttttgcctggtggcacctacgcattgattacctccgaattcaccgatgaaatgggcttttccaactgaagcggccaattgagagttttgtttttcccaatccagaattgtggagttcggagtttcgtagccgaagatataggtgtgggagttgaatacgtcagcaacgttcgccagtcctttcgtgcaggctgccagatatttatgcgttcctgtacctccgtctgaattgtcagaaagactgaaatgtactttatttcgtattccatcctctttgaaacgtctgtcgagtactttacacatttcaatatagttggcggtgggagcagctttacctttgatgatatatgaccaatctggttcgttgatcggagtaatctctttgacgcacgtgtattttttgttgttgagcaggtgttgtacaagtgcggaaaagttctcgctccattcttcatagttagtcggggctactacccagttaccataattcccttcggccaggaaatgtcccggaggggctccccaaagtacaagggtgacttccattttctgttcttgtgccatatccaatactttgtagagtgattgcatttctacagagttgaaagtgaaattatgccagtcgattttggatgcatccggattgtcattctttggctcataccattgtggcatcaccatcacccgtaagctttgcagtcccatttctttgacacgtttcacaacgatgcgctcccagtcttcagctttagctccatcattgcgggtcacattttgtgagagaaagtggggatctagttctgcacctatagcacggagctttacaccggttttctttcctacagaaagtttctgtatggcagttgttgaactttggtatttgattatcagactactttgcgggttatccagtgtcagcgtgaagccgttagccagttctttaccggttttctttatagcttctcctgtatctttattggtgagtatataagtgtggtcagggtgtagccctgataaattgacagtatagctcttgtccggattgtctttgcggcggaaagctacgatgtatccgctgtcatccgacggacgataaagttggtatgctagccagatattttccgaagtaatgttgtttattccactcaacggatagtaatcttcatagaaataggggcggagttctttgaactctgcctggcggtcgcgcatatcatagatggattgtccagcttcggttattttccagttgtagataatagaggttccgaggctggaacggaaagtgaatttatcggcactcacagttcctgtaccatgcaggggaaggtataagttcaatccgtaagtatggcattgatagccgattggttctccataactgtagtctgttctccacatcggtgcactgcgtgagatactttcgaggtcaatacggcgtccgccactggcacaattatcaaccagcaagcccggaaagcggttcagcagatattcccagaaagaataaagtccttcaatgtatcggatttcgcagataccttgtctgccaggttcatcattggcagcccagaaaccttccggctctatattgaaatcctggcggtagtagtctatgccattttcttcgaggaagtctccgatatatttactcatccatcgacatgcctccggatttccgagattgaatagataagagtcgtgctcaccatctcttgtccagtcttcctgtttggcttttcctctggcatccaacatccattgagggtgttgcagtgcccaagctgagcctttcataacacgctccggttcaaaccataccatgaacttggaaccaactctatgcacttcgtcggcgatggggcgtaatccttcggggaaacgaatagagtcgacggtccagtttcctacggtgttcgcccaattcttatgattggctacatctgcagagtgattgtaccatccggcatccagccagaatacttcgggtactaatttgaattgttcataccgtttcaccatagcaatggcataatctgtagtcaggcaggtatattcattacagggagtaggatcaccgtagttgaaactggtcgatattggatatacggtcggtttaccacctactttccaagtgtggtgggcttgcacgaaacggcggaactggttgtgtcctttcatccggtcggaaccgttccagaatgacaggcatacactggaagtgcggatgctctcttccggatacagataggttttcaaacgttcaattccggaggtaagcgctacgctttgctggtctgcacagcgcacatcggcaaaccaggttcctgtccatccgatggctacgataactccttgattagccggagattcaatattgaagaatggcatacgcatttgtgaagagcgtccaccttccggtctcatataaagattatcacccggagacaagattgtaagttgctggctgaaatctgatttggatgcatggctgccttcggaatgatgaaggttgaatgctcccggatgctggtagcggaatgtgatatcagacacttttacgttggcaatctccggcgtatttttctttccctggttggtgaaacggagtacccattccaccgtattgaagtcggtaaagcctttcacttcacattcgacttttaatcctccggatggttcacgataagtataaaggtatttcagagccttgggatcgtcacttttctgacgcgtagccgtataagaccagcttttgataaattcctgtgaaggtttacctccatattcgaaagagaaaggagggactacaccgcgggcaaagtgggtggttatccattggctggtgtttaccgggcggtcgctcatgcgggctaccgtctgtcctgttccattatgagggaacagaagcagaatgaatagataatatagtattctttttttcattctttattcggtttttcgttggtaactttatattttagtaataaggaactatgtggcttttcgaggatcagtggcaactgactggtcagttcttttccctgatagattttgctctgtcggctatccatgtctgtcactgtatagtattttcccggatccactcctgaaagtctgacggtgatttttttgtctttggaggcggttctgcggaaagcaacgataataccactgtcgtccgacggacgatgcatttgataggctagccagatatcatcccgcgtcatgtcttctgtatctgtcagtgggtaataatcttcgtaatagtaaggtctgatttcgtggaattctttcagacaacgttgcatttcgtaaacggaggcatttttatcggttattttccagttataaatcaaagctgtgctgacgcttgagcggaaagaatacggatcggtctgtaaactacctgttccatgtaaaggtaggaagaaattcaggccatacgtgtgacattggtagccgtccggatcgtcgtaatgataataatcactcctccatagtggtgcgcttcggccgattgtttcccagtcaatacgtcgtcccccactggcacagttgtctatgagcaggttcgggaatcggctcagcagataatcccagaagtagtatagtccttcgatgtgtcgtatctctttcattcctgtacgtccgggctcatcgttggctgcccagtagatatccggctgcatattgaaatcctgacggtaatagtctatgctgttttcttcgagcatatcgcctatatatttactcatccagtggcaggcttccggatttcccagatcgaacagtaggtaggtgtcattgttgtgttcgggaatgtcgagcatccagtcggggtgttctactgcccattgggtaccacggatgacacgctcgggttcgaaccagaccatgaatttagctcctactttgtgtatttcgtcggctacaggacgaagtcctttggggaagcgcaatgtatctacagtccagttaccggctgtgttggcccaggtcttgccatgttcgaagtctgcagcatcggtgttccatccggcatccagccagaatacttcgggcttcaatccgaactgtatgtaacgtttcaccatggcaatggcataatcggctgtcaggcatgagtattccgtacaaggtgcggggtcccgatagttgaatccgctggaaagaggatattcggcaaattttccgttgattttccgtgacttgtgtgccaggacaaaacggcggaatttattgtgtcctgccatccggtcgatattttcccaaaacatcagactgatacttggggtacgaattgtttcctgtggacgtaagtataatttcatggttttcattcccgaagccatggatattgtacgattatcttgtgcgcatacatctgcataccaggtgcccgaccagcctactcctaatatgactccctgtccggcaggtgattcaatgttgaagaaaggaagatagtccccttctgaagagcgtcctccttgtggagacatctgtttggtttcacccgttgccagagtaaccgaacgtggatggaaatcatatttggagatatggtttccgtctgcatagtgtaacttgaattctcctttagaagcgtattgcatggcaaggtccactactttcacttgttccagagtgggagagttgctcgtacctttgttggtgaagttcaatacccattcggcagcctgataactgggatagccttttacggtacattctactttcagtccgttggtaggattgtagtaggtaaagagatactttatcacatccgcttcttcggattctatcttttgctgggaatagtcccattggcggataaattctgcggaaggtttcccgtcacatataaacgagaacggaggtgtttttcctttagcgaattgtttctgaatccatttttcgatttcaggaatgtgtttggagattttagccgtcgtctgacccacggctatgatgctccacacactcataatcagtaatgagaacaggaatttcgattcgattttcttgaaatgtttcattagaatataggtttatgtggtttttatttttctcattattccgatcagatagcaccatacaatggcaagtactatgattgcagataactgactgtggaatgaatcggtaattactcctaaaataggcgggaggacggcaccgccagatacaccgacgataagaagtgcagatacttcgttcgctttctcgggaacacgtttcaaagacagagagaagatgatggaaaacagattggcatatcctatcccgaaaactgctacacatccgaggataaaccagagattagtgctaatggtcatcagtatcaatcctgcgagagctatccagacgctataaatatagaatttactttctgaatatttcatcagtaggataccacccaaaaaggctcctacagtgcgggcgaagaaatacacactatttcccattcctgcatctgtcagtggtagatcacaacgttccatcaggaatttagggaaagtcatattgatacctacgtctacacctaccagcacgagaataccgataaagaaagcaagaatgtatttgtctttgaataattcaagagtgactttgaaagaaatgttcttccgttcctgttgtttttcttgtataggggtaagccatagccatatcaaagcgagcagtgacagtccggcataaacggggaatatcattttccatccgaaaaaactaccagtcacccaagctgccaggataggacccaggaatgaactgactgctttgacaaattgtcctagggttaatgtacctgtcaacttatcgtttgcaacgacatccgttactaatgggttgagtgaaacttgcaatagagtgttaccgatacctatcaaggcaaatgcgattaatatggcggtaaagtcatatgcaacgagtggaaggcacatagctaatacatggaatgcgaagctaagtaatacggttttcttgcgtccgatgcgattcattaacattccggtgggaatagaaagcaccaggaaccacaagaaacaggatagagagatgagattaaccatcgtatcggtgagatggctgaaatcattcttcacatagctcgtggttattccgacaatgtcaacaaatcccataacgaagaatccgaacatgacggagagcatttttactatggatatttcttttttcattcgtgtacttttgatgataaattacttggttggtgggcatatatatccagcacggcggatatatatggctaacatggtgaatatatatgcccaatacggtgtatatatatccccactaaatggggtgtatatacttctatttttgtactaataccctgattgatgaacgagataatttaagttttaggttattctcttgcgtgttgaccgtttctgttgattctataagattatcaccttccggtaggcgtccttccatatatttgtagacattgtattctccattggcaccttctttatcattttccaactgtatcatcttgtctttgtctgtagcgttggaaagtacatacgtccattttccctctgtgttgagaaaagcacttccggctatcaactcgtcgccgagatccaatggatatacttcgtcgccctggcggacaaaacgtgtcaacagactatatgcatagtattgaggacgtacctcgtagtcttccttgattttggaatatacatctgggtcttcggtataagcggattttagatatttccataaaccgagttgctgcatttccgaataggaggcattgcggttataatattgatcgatcagactccagtagcttactccgcaagcaccggcattcagatagttcagagcaacgcggattagctgtacccctcgcgtatacgtgtctataccatattgacgggcacttccgtatccaggaaaaccgaattctccaacaaaatgtcttttacctcctgcagaagctatattttgacgttcccaatttacgagagtcgaattaggggtgttgtagtcaaacttgtatacatgagagttatacaggtcggcttcatcgtttgtgaaagcggaaacacaggcagcgatatatccgggtgtaccgtctgtattgtcagaaaggttgaagtgtaccttactgcgtattccatctgctttaaacttggcatccagtgctttcaccatgggggcgtaggtgtcctgccaacccatggtttcaaaatcaccttgccacatgatgcggccgtaacctgctatatgactgtcaggttcattgaatggagtaatttgattgatacaggtataatgcttttcttcaatcaggtatttcaccattgtggagaagttttcagcaaattcttcatagttatctataccggcaatccaacccggattaacgttataacttcgtgcatcacacaagaaatgcttttgaccattgttaatgcctgatagtaagtcgatattggtaatggctccccatacgactaatgtcactccgatattattctcctgggccagatccaatactttgtatacagattgcatttcttccgaatcaaaagtgaatttgctcatatccgcgacattaggatcgttgttgtcattggagggttcccaccattgtggctgcatcatgattcggaattgttgtactttcattttctttacccgttgtacaactatattttcccaatcttcagcctttgaaccatcattgcgggtgatgttttgtgagaagaagtgtggatccatctcgacaccgatagcatgaaccggagttcctgttgaattccctactgcaacaggataatagttgcaagccgggcaatcgtcatatttgttataatcatccgagcaggcggacattccccaaagtgtgcaaacaatactcaatagagttttactgatatgtgtcattttcattgccatattgattaaatttagtaggttattattcaaagcctaattctgcctcaattgcctgaatcagaatgtggataactttgatgtgaatttcttgtattctgtcggaatgtgctgctcgtggcgcgcagactgcaatgtctgccagtcgtgacagttcattctctccttttgaagtcagcgctatcactttcattccattgttgtgtgcttgtacggcagctttcagtatgttctcggaatgtccgcttgtgctgatggccaataatacatctcccttacatcccatagcttctacatagcgggagaagatctcgttgaacgaaaaatcatttcccacacaggtcatgtaagccgggtcattgattgcaattgccggtagcgggatgcggttgttgcggtaacgtccggttagttcttctgcaaagtgggtggcgtcacataaagaacctccattaccacagctgataatcttatttccggcttttaatgcttcggcgcaggtagaggctgcctgtgaaataatcccgactgttgttgtttcctcaagaaagctctccaacgtttgccgagcctcttccagtgttgtttcaataagctctttcataatagttaatcggttaagttagcggctacagaaagagctgcataatctcctatctgctctcccaaggcggctggtttcactttacatactctgtttgcacaggataatgcttcctgatcgattatcttttgcatgatgggttccatcatatttttattccgggtatagatgccacctatcacaatgacttccggattcaagatatcgatcaccatggataatccttttcccagataaatagcagacgtctcatatatgctttgggctaatttatcacctttggcagcttcttcagccacttttcgggcagtaagctgatctagttcctgtaaggtacaccattcaactttctgtccggtctgcaatttctccatcacatacattttggagagttgagcaatacctccaccgctggcaaatccctcaaaagagccctttttaccgtaacctatcggaccgaaatccgacaggcggatatgtcccagttctccggcattgtcattggtgcccgtatacagtttgccatttaatattaatcctgctcccagtcccgtaccgaatgtgagaaagaccatattcttagttccttttcctgctccgaacttccattcggctaaagcacaggcattggcatcattgtgtagactggttttaatgcccgtctttttttccaccattgccacaatggggatgttgtcccatcccggtaggttagggggagacatcacgatgcctgtttcactgttgagaggacctccgcaacagattccaatcgcttttgtgttagtaggggttagctggtggaggttcatcatcttttcggtttcacagagaattctgtctattgtttcgtcgactgtggtcgtatcaaatttctttttgtcgatgatatgtagctcgtcgttttctttgataccgtagatgatggcgcatttggtgcctcctacgtcaattcctaacaagttctctttcataactattattttttagcgtataatccggttttttgtaacagccgcttgtattctttcaagttgaaaggtgccttgccgtataggtaatgattcatgaatttctgattaccgatctggtattggatcagatagattccttgaccgctttcttccggtagtgaggctattctgaccttttgattggctggaatacggaaagtgctctcatagattttacgtcccgaggatgcatctgttaccgttacattaccactttgtacgttgcgtgtgtcattcgttcctatcagtgggtaatttccgccttctgcatcattgattagtacacaaacatcctgttgaacattcttgatgaaataatatgccatcttctttgaattgtagtagtcaacaatcgcatcagagatcactggccatccatcccgcaggttccaccagacaataccagtcttgtcgtcaaacttctttccacgccacatttctatgaaatatttcatagcttctgcctgtacggattgagaagcgaatataaaatcatccagtttggagggaacttcaccaaaaagtaaacgtacctgattaatcataagattattgcgatcgaatgtctttccccattctgggaatctacgaacagatttggtaacccattcatcattccattcatgattttttgtccagggatatacggcatcttttgtcatcattttctggagactttctaaattagggcagccgtgatagccgatttcactgacaaagcagcaggtagcatccgtatagaatttgtctttgtaatatcctctgggaccccataaatggttttctggtaaatattggtcagcacttcctctttcatataccgcttggctgtagtaaggagagctgggaagataagggcgagtagggtcaaactcataaataactgccgggaggaccttgcggctaactacatcctgatttggattaatattaaatggttgcaaagaccagcgcagtgcacaatcgtcttcattatttcctgaccataaaacgagtgatggatgattgcgtaacttgcatacaacggaaatggcctcttcttccaatgcttgtgtaaatgagctgcgttgaggatagaaagtgcatcccatcgtaaaatcctgccataccataatgccgttttcatcgcataaattaaagaaatgatgatcttcatacacgttgccaccccaacaacgtatcatattgcagtttaattctacagccatgcggatagattcgtctacgaaagaatgatcccggctatggagtgcatccatgggtacccaattggttccgtgaataaaaataggttctccattgactatgaaacagaatttacccggatgatccggtgggaggttgatgtctgtaatgtctagttgaatcgtgcggaggcctacccgtttattatctgttgatgaaatagtgccgtcagaatctactaactctacttttgcatcatataaagccggttctccatatcctcttggccaccataaatcagcattcttgatttccattatatatcggaatgctggggaaacgacaacagagcttcctttatatatttctttcccatggcgacttaatgtatatacggctttcactttgtcgaacttttcgaaaggtagttttacttgtacatcagtatacaaacgtacatttctggtagcagtgtctacattggcgaccatatagtgaacatctgtgagacgtgccggattcaatacgcgtaattctacatctctccacaaacctgcactgactaatcgtggcagaatgtcccatccataggtgtgcggagcttttctgatgaatacggattcttcagacgggaagtttccaatactgaatgtccctaacagatgtttttgtccttcaataacagatgaacggagtatcacttggagttgattgctttctcctgcttttatttctttagttacatcaaaagcatgttcaatcatcatattttctgctttgccaatgtgctttccattcagccatatatcggccagacagtctattccggcaaagaagagttgatattgttgtcctggttttagttgtggcgctacgaatgatttggaataacaccattgatagccttcccatttgcgtaattcatttacattactgccaatcatcggatctttaattaagttggcagccattaggtctagttctacattaccggggacttgggctgatagatgtttcacttcagctagttgcatgtccttgggcgaagttataggttcttcaggttgcatccaataagagagttcccatgttccatttaaggagatggaactaccggaatcggcaaaaacaccacttgtacaagtgagaaatatcaaaaatagcagtgtactgattttattcattgttaatagatttgattgatggtgtgacaaagtaactagtgttatatttttatagtattacataacggtctcatttttgcttctttatatacctctattaaacctcctttcttttgtttcaattaaaatgtgagttgatgttttcctgaccttaaatctatctttttaccattatattctactgttgcattcgtattgactgggatcgtgactttgagaatcacttgttctcctttacgttcccattcagaacgaatgattccgtttacagatttatattctgcttttacccagtcaagaccttttacgaaatgaggttggataagaatatgtttgaatccgggtttctgttcatcataattaatgcctgccaatatattgtacatccatgcattaatgtctccaagaaacatgtgatttacggaggcatctctaaattcaggtgaaagtatccatgtttctgctagtgtagtgaaaccttgttttatccaattgccccaagatggagcttcttcttgtgcggccatctgatatgccaagtcagcatatccatatttggaaagcatccgcaggactgttttactgcctaaaactccaaaatcgagcaggtttttattggcttttatcatcgtagaaagattatctgcaacctgctgttcgtattctttaggaacgattccaaggtataaggcaactccttgtgctgcttgcgaaccattggcataaatagctttggatgtgtcgaagtatttgtgattgataagcaatttcaattcttctgctttcttagcataactactaccatcttttccaatgagttctgcaaatttagccatatacagattgtctaaataataatagcaggtagtggtgaattctgtaggggtttgtgttttatggaatacccagtcaccaattccgtaagttacggttccttccgcgtcctcgcgtcctgcgaggtaggcaaggtatttggtgcatacaggccatagtttttcgatgcttcttgtatctccatagtagtggtaaattgccattggcacgataaacatggcagcatcccatacaggacctatccagtcatcatagccccatccggaactaggaatgattcccgatatacgtccttcttcattttgattatcaatcatatcatccagccatttttcatagaaagtaataccatcgaagtttaataatcctaaatccattgttatgtgtgcatcggcagtccatccatttttctctcgttggggacagtcagtcgggatactcatcagatttgataaatatgattgattagcagctttccatattttatttaatagttcatttgaacaactgaatttaccaacaggaggaacagccgtatgtatgaattgagcggttaagctctctttagtaagttttacaggacgatctgaacgaacttctacatattgaaatccatgatatgtaaaatctggagtgaatgtaccttgttttccgtccaatatataagtgtctgtttgaaaagcgaggccaggtaatggtttgtagtaaatatctaagttgcgcatttccaagcgtccgttatcttttagcaattcgccgtgttgcatactgactttagtgcctttcttgccattgatagaaagagtacagacccctgacatattaactccaaaatcgtatacatagactgtatcaccaaaagaacgcatattgattggagtgataaattgttccgtttcaatagcaggcatgttttgtgatactagtaggggagaaggggcagccacctgaattgcatttgtccatttagagtcatcaaaacccggtttgtcccatccagcaattgcaagacatgcatcataggtatcaccactataaatattgttttgtatataaggaccggtactcgttttccaagtagaatctgaatggatggtttgcttttctccatttttatataatatctccatttcgcagatcattcttgggcggttacgccagcgggcttgctcatagctccatgttgctacaggggccgattcgttgtagaatccgttcccaagtattgcagatagtacgttctctcctttgagcagttgtgaagtgacgtcgtatgtgttatacagatttcttttatcataatgagtaaaacccggattgagatgtgatgatgttattgatttaccatttaatgtcattttataatatgcagcggcacttacatataatcttgcttgttgtatatcatcttgagcgataaacgacttgcgcaacatgggcgctggcgtataatctttatcatgattatcagtaatccatactcctgtccagtcactttggttgagttgagctgtctcaaaactggatataggagagataatcttatgttcctttgttctatcccatgctattacttgccagtaataacgagttctggatttcaatttttctgatccttgataggtcgcatgaggagtgtcagagtaaatagtgtcagattgccagctattatcggatgagtttctcaaatcttgttcccgggtggcgatatatagctgatagctgtcttgagaaaactctgttgcatcttcattattggttgtgtaattccaagtaaaacgcggtgctggtgaatcaatgccaattggagaaatttgatattcacatcgcatattttcaatatcaatgttgttactgctgcatgcccatactagaagtcctaatagagccagcatgtatttttcatttttaatttggaacttcataattctgtatctttatgttaataattagagggctattttctttattgttacatttgttaatttgatatcattatttatttttactaaaccggttaagtgattgaagaaaaaatgtaaaatcatgactagggtaatgaacatggcaggacaagtgtttctacttcttttttttcggtcgaattttccaagcgatatttgatatcgccaagtagaatccttacggcattcttaccgatctcttctattggcattcttgcgatgttcatattaggtgctaagacacggaatgctgatactccatgaatacaagccaattcatatcctttatttatattgattcctttttcataaaagtaacggaatgcttccagagccaaaatatgggttgtgaagaagaacccatctacatcaggtactttgctgaatatttgatcaagagtcttgaaaacattcttctcataatcaacaaaggtcacctctccatatagatcaggattaacgggtaggttggcttcaattaaagctcttgcatacccttctcgtctcatattcattgtgcggagatgaggattcgtggtaataatagctattttagatgatccgttatcgatcattttctttactaactcgtagctactgccttcattgtcaataatgatgtagtttgtctgcatctcaggaaagtagcggtcaaataagactaatggatagccttctttgactagattctgtatttcaattttagaaacttttgtgggggctactataattccatccacctgtttcgctttgaataaccggatcattctgttttctctttctatttcagattcagagctacaaatcattaatgaatagccttgtgtttccgcttccttttctatagaacgggcaactttggagtaaaaagagtctgtaatatccggtatgattaatccgattgtgcctgatatacccgtatttaggcttctggctaataaattaggctggtaattcaactgtttggcgcattgaaagactttttcttgtgtagcaagactaatacctttttcatcccccttaccagaaagtacccaagagattgttgtcttggataattttaaggtttctgctatgtctttaagggatgttttcataaacagtatctatttaatcggttaagtgatggcaaatatatgaaaaaatatctcattatataatagttgagcaatatttaactaaatattattttttaatataataatttgcaatttaaaaataacatagaaataaggtgtaaaccaaagaaagtaactatatttgtatcattcaaacgaaagatatatgaaagtaaagaaaattagtgcggctaacgtggaggcttgttcgcttcctaaattattcgatgaagaaaaaatagattttcagccggttcagtgtgtcaattgggctgaatatccttacaaacctaaagtgaattttcgaattgctcacacacagaactcgattttgctacattttaaagtgaaagaggagagtgtacgtgccaagtatggagaagataacggttctgtatggactgactcctgcgtggaattcttttccatacctgcaggcgacggaatctattataatatagaatgcaattgcatcggaactattctggtgggtgccggacctgtgcgtaacaaccgcgaacatgcaccgaaagaggtgactgctcttgtacaacgctggtctagtctgggtaatcagccttttgctgaacgcatcggtgaaacggactgggaggtggcccttattattccgtattctgtgttctttaagcaccagattgattcgctcgacggaaaggagataaaagctaatttctataaatgtggcgatgaattgcagacccctcatttcctttcatggaatccgatacagattgaacagccggatttccaccgccctgatttcttcggaacgttggagtttgaatagtgaattgaatctttgaatttgaagataaaaaagaaggttgatacttgaaaaagtatcaaccttctttatatagactcactttatttatttcacaatccctctttccgagttcttcacgaaatttacaatattctcgatctcctcactcataggaacctgatcgatgatcttctgtacagcatcctgaacgctaaaattaccctgataaatcaaacggtatgcgttggcgatgtgacggaggactctttccgatgtattgcgatgttgcgagagaaccacagcatttacaccgtgatatgccaccggatttcctgacatgataacgtatggaggcacatccttagatatacggcatccactttgtaccagtgtccagctacctatatgacaatattggtgtaaggtgacattgccacttaggatagcgcagtcatccagcatacactctcctgcaatggtagtacctatgcctactacacagttattgctgatttgtacatcatggcaaaggtgtaccttatccattaggtagtttccatttccgattttggtagcattgccggcaaatgtagcgcggctgattaccacattctcacgaatatcgttgttatctccaataatcaggctactttcttctcctgtgtagtggaaatcttgcggttccgctccgaggacggcattctgatgtaccttatttccttttcccattttagtaccttgcaagatactagcgtaagacatgatgacgcagtcatctccgatctctacattcttttcgatgtaggcaaaaggcagaacagttacattcttgcctagctttgcttcgggatctacgtaagctaacggactaatcataatagtatatgtttaaagttattcttctcttccaccacccagtgcctggtaaaggcttactactgcctgcattcgatcaaagcaatcagaaacctgagagatttgtgcgctcaggtaagactgttgtgcagacaatacttccaggtaggttgaggtccctaagttaaacaattcttttgtatcttccgaagcttttttagcagattctacctgcatttggcgagattctaccttttcactggtcttttggtataaacttagcgcattgctaacctcactaccagcattcaataaggcttgttggaaagataatttcgcttgttcttcctgcgctttagcagctttcaggcgagcgatgttctgtccgcggtagaacaatggctgtgtcagtgaaccgacaacagaggccaacaatttgccgggattaacgattccggctcctgaattatttgtccatcctgctgaaccgctaagtgtgatttgcggatagaaagcggcacgagccgagttggtattataatagcaactagccaatgacatttcggctgcttttacgtccggacgattggataatagctgaataggcacaccggcggaaagttcggttggaagtacttgtgcttccaattcaccacgcttgatggcatggggagcctctcccaaaagagtagacagtgcattttccgtttcgcggatactctgctcgatatcaggaatactggcaagtacctgtgcgtaagcggctttactttgttctacaccagctgaattgatgctatacatggccgcatctttcatggcttccatcgtttctgcattctttttcagaatttctgctgtagccttggttatttccaactggcggtccaacatcattaatgtataatacatattggcgacgttagagataacctgtgtctgtactgcctggcggtaagccttagtttgcttcagagtaacctgggcactccgtttagcattcagtagctgaccaaacaaatcaatttgccaactagctgtgacaggtaatgaataagtttttgtagctgcgttcttgtcgaagctgctaatcgttccttgcggagacaatcccagtgacggagcataagccaaacgtgccgacatcagggatgcttctgccgctttcacattctgtgcagcagacaagaggtccgtattttgtttcagtcctgcttcgatgagtgactggagttgcgggtcggtgaagacttctctccacggcagatttccgaagttggctgtatccgaaaccagtgtatcattatccgctaccggatcgcgatacaggccggaagtagtgatatcttcgggtctgtcatacgacttatagatgtggcagctgctcaagagagcagttgcgcacaacatatatagaatctgtttcttcatatcgaatttcattatttagcgtattgttcaatctctgttacggcatctgcattgtcaatatcttcccattccatcggtttaactttctcttgcagatactggaagataacaaacaaggcaggaacgatgaaaatttggcaaatcataccgattaacataccaccgatagaggcagtacctagtgtacggttaccgtgggcacctacaccgaaggcaaacatcaatggaagcaaaccgactaccatcgccaatgatgtcatcagaatcgggcggagacgagcaccggcacccaatacagctgcccaagtgatactcatacccatcttgcgacgatctagggcgaactctacgatcaagatggcattcttcgccaacagacccatcaacatgattaacgcgatctgcatatagatattgtttgacatcgtacccagaatcatcttcaatgccgaaatattaccgatagcacttacaccattcacaaacaggaaactgcctaacagaccgaacggaatggataataatacggccaatggaagaatgtaactttcgtactgtgcactcaacaataagtaaacgaatacaaaacagagtacaaaaatcagtccggtagcacttccgctactttgagcctcttcacgcgccatacctcctagttcatacgtataaccggtaggcaggttttcttgagcaacttcggcaagagccgtcaatgcctgaccggatgtataaccacttgccggagctaccattactttcatagaggtataaaggttgaaacgactaataatatccggaccatatactttctccacagaaatgaactgggcaatcggggccatctcgcctgcactattacgcaccttgatattttttaaagattccaggtttttgcgtgataacggatctgactgaatcataacacgatacatcttaccgaaacgattgaagttggatgcgtacaaacctccgtaatatccttgcatagtagtgaggatatcgctcgggctgatgccagcttttttacaagctgccgcatcaatgtcaatcatgtattgcgggaaattcgggttgaaggaagtctttgctgaattaatttccggacgtgcttccaatgctgccgtataatcattaaccacatcgaagaatttgttcagatcaccaccggtcttatcttgcatattgacctcaatatccgtagatgccgagtaacccgggatcataggaggagcgaagaacaatacctgtgcttctttgataatcttttgtgcacgcatatataaggaaccgactacaacgtctgaattctgtatcatggaacgttcgtcccagtctttcagtttgatgatgaaagaaccgtatgatggtccctggccaccgataaagctgaatccggaaatcatggtacgtgacaataccgcaggatcggaagcgatcagactgtctacacgtgccaggattttttcagaacggtcttgggaagtacccggaggtaatgtcactgctcccatcagcgttccggtatcttcattaggcaccatacctgtcggagtggtgttcatgaagaatacaagtatcgcaatggaagcgacaactaatcccatagacaaccatttcttctggataaagaacagtactcgtttcttataacgtttcaggattgattcgtatgtatcgttgaatctgtttttaaacttcttcgtactcattccgatcagtgccagaatactaagcactacgaaaattgcagtgactatcggattgatactgaacaaaccaaagatcatgccgagaatggcaataagcgtcaaagtaagtgtaattcccggatgcaacatctttccgatagcttcggtatatctgttgatcatagttgtatgggctgccgtataggctactttcatacgttctttcaatgtggagtcttccgttgttccatcttcttttttgtgaggtttcagaagaacggcgcacaaagccggactcaaagtcaatgcgttcaatgcggacagaccgatagcgatagccatagtcataccgaactgacgatagaatgttcctgctgtacctcccatgaaacttaccggaacgaatacggccatcataaccagcgtaatagatacgatagcaccacccaattcattcatggcatcgatagaagccagacgggcagatgtataaccttggtcaagcttggcatgcacaccctcgacgaccacaatcgcatcatcgaccacaatcgcaatagcaagcacgagcgcacataacgtcaacaagttcagactgaatcctaccagggacaggatgaagaaagtaccgatcagagctaccggaatggcgatagtcggaatcaatgtggaacgtaaatcctgcaagaagatatacactacgataaacaccaggataaatgcttcgatcaacgtcttcaccacttcatggatagaagcgaaaaggaagtcattggcattcatggagatgttcagtttcaatccggtaggcaacgtttttgatgcttcatccaacaatgcctcaatatcactgatggtttgtgtcgcattggttcctgccatctggtatacgatacaagtcacagatttgtgaccgtctacccggttggtaaagttatatcccaaacggtccagctgaatttctgctatatctttcagacggagtacttcaccgtcaggaagagatttgataacgatattttcaaactcttcaggctgttgcaagcgtcctttataacggatggtatattggaaagtctggtcactgcgttcaccgaactgtcctggagcagcttcgacattctgttctgccagagcagcggaaacatcaccgggaacgagcttgtattgtgccatgacatccggtcgtaaccagatacgcatagaataatcctgacctaaaacgttggcatcacctacaccctgtacacgttgaacttgaggaatcaggttgatcttagcatagttttcaataaacgattcgctataggtatccgtctcgtcataaagagagaatactaccaacatggaagtctggcgtttttgagtggttacaccgactttagttacttcggcaggcagcagaccttgtgccatagagacacggttttgtacattgacggcggccatgtccggatctgttccttgtttgaaatatatggatatatcaccggaacccgtgtttgacgcagttgaggtcatatacatcatgttttctacaccgttgatttgttcctccaacggagcaatcacggaattcaatacggtcgatgcactggctcccgtataggtggctcttaccgaaacggtaggaggcgcgatgtccggatactgcgtgataggcagtgtcgccaatccgatagcccccaggatgactatcaggatagaaataacggttgatagtaccggacggttaataaatctatctaatttcataatgattatctgattattagttgaaggctgtggctaaattaccgtcgtgttggtctttcaaatgttgttgatagtttgcttctttttgcgccggtgtgataggctgaaccttctggccatctttcaggttttgtactccttcgattacgattttatctcctgaattcagaccggaagtaaccaagtagtcttttccgttatccagattgaagattttgatttctgtatattttaccgtgttgtccggttgcagaacataaacgaacttcttatcctggatttctactgttgcagactgcgatatagtgattacattctccatagcataaggaatcagaacgtttgcagtacctccgctacgcaatacatgttccttattcgggaagatggcacggatgcttaccgaaccggtagattggtcgataacgcctgtgatagcatccactttaccctctatatcgtatgtggaaccatcgattaattgtagtttgatagtcggtattttgctgatttcttctttgatagtgctaccggacttggtcattgccagcaattccttttctgtcattgagaagtatacatatacttcgtcaatctcggaaacagtagtcatcggtgtagcgatagaagggcttaccaatgctcctacacgataagggatattgttgataacgccatctgacggacttttaacctgtgtgaatgacaagttctgttgagcagtggtcagttgtgcttttgcttgtgccagctgggctttggtctgtgccagggagttttctgccattgccaggtcatagtcactgatgatttgctttttgttcaactctttcttattgtcatacgtcatctgttgagtgctcactgctgcttctgctgtagccactgctgctttggcagtgcgtacagctgcttcgtattgagtcggatcaacaatgaacaacacttgtcctttacgtacagctgctccttcgtctacacagagttttgtgatgaagcctgatacttgggggcggatttctacatcttgtttacctttgatggtagccggataggcagttgttaaattagcggtcgtcttttgtaactcttgtactgcatattcaggaacctttcctgtgtcattgcccttattgccacaacttgacaagagggctacgcaaaatgcaaataaaacaattctacttttcatacttataaatatctgttttttaatttaatgcatttgttgtcagtgtgctgttcgtccatatagattaaggaggttaaggaagaaaaagccggaaactaattcggttaaattagtttccggctgcaaaagtactttaaattcggtattcttgttctctgataccgtgttttttaactatgttttttactttattttatgatatacaggagtcataataaaacttaactcataatcttggtaaggaagacggtatttttccagtggaatggctccccaactgttcacacaagcaagtcccgcttgtgccttatcgatacagaaattggtgaagtctgccttttctacttccggtgagtgacgttgatctttaccgtcaccgtcatccaatgactcgatggtataattcagggcagaagcagagaaaggagcatccgatatgaattgcaatccgttaccactaatgttcagaagtctccaccagcggatatccgttttggttccggtttcctgcgggcggatgtaaggatagaattgttcttccaccgtctggcggtatttgcctaacatggctccgtggttacggtcagcatagttctctcccggaccacgaccgtagtactctacctcgttgaagttgacaggcattcgcatttgcataccgaagcggaacatgtcagaaaccttcttactcttgtctgccatcatcttttgggtaactttcactgctcccttgttgttaatggtgtaagtcagcgataatgttccgccaatcgacttcatgtcatattctgcacgaaccactgcctgatcgttttcaatagcatgtttcagagaagtcagtttcagttcaggattcttccaggcagcgtatttatgttgcagtccggctccgaaatcattgtcggtcggtgcacgccagaagttaggagtcagtgcgctgccgtcttccatcagttgcatgccgttgacgtcgtagcgacaaaggtaaccattgtgcttattgaagtccatagagaagttttcacctttcacaatcaggtaattgcggtcgttgtccaaaatactgggcacgataaccggaatgttggaagcctgttgattttccagtttcagttccggtgctttgtagtcgcggatgcttaactggtcgtaagcgatagtcgttcctgccggcagcaacgtttcggcggctttcagtttatagctcacattcagcaacaattccttgcaaggacagatattcttcacgtccaacggaatttgcactttcacagtttgctggggtgcaactttcaggtcggacacgatgcctgtttgcactacttccccgtttgccagtaattgccattccatataatatgcagagaggtcgcggaagaaatattcgttgaagatattgatctcacctttggcaagatctgcaggagtagtccatatatcctgatagaaataagccacttcgtatgcatgcggattaggcacgcggtcggggctgattaaaccgttgtcgttgaaattgttgtccgaagcgtcgtatttgttgaaatcaccgccataaccatagatatttactccgtctttgtttttccagtggcaggattgatctacaaagtcccagataaatccgccctgatatttcggatatttgcggatgatgtcccagtattctttgaatcctccctgtgaattacccattgcgtgcgcgtattcgcattggattaacggcttttggatgtcgccttcgctatatttgatacaagcgtcgtagtcataatacatcgggcagaaaatatcggtgaattcgctggttcctgcttgttcatactgtacggcacgtgtcttgtcttcgttcttaatccaagtgtagcattcctcaaagttcggtcccatgccggcttcgttgcccagtgaccagaagatgatggacggatggttgtatccgcgttgtacattgcgttggttacgctccatgtgagctttagcgtaactcgggttctttgccagtgtctgatcgccgtaacccattccgtgagattctacgttggcttcggccactacatacagaccatattggtcacaaaggtcataccaacggttgtcgtccggataatgacaagtacgtacagcgttgatattcaattctttcatcactttgatatcctgcaacatacgttcgagagaaacgacataaccgccgtccgggtccatttcgtgacggtcggctcctttgaagagtaccggttgcccgttgacgagtatctgtccgcctttcagctcaatcttgcggaatcctactttaacggggattacttctactacgttgttgccgtttttcagtgtagcggtcagcgtgtagagattaggcgtttcggcagtccatttggccgggttggagatggatagggtagtgtttaatttgccagagcctttcaggtcggcagttgctacactgttaccttgagtatctgtcaagtccaaggcaactgtgccgcttcctttcagatcaacggctatgttcagcgtaccgtctttatattggctatccaaatctggagtgaggcgaatatcctggatgtatttcttgtcacgtgcgtaaagatagcagtcacgtcctacgccagagtagcggaagaagtcctgatcttccagataactgccgtcgcaccagcggaatacctggaaagcaatcacgtttttacccggtttcaggtagttggtcaggttgaactcggcttccagtttgctgtcctcgctatatcctacgtaacgtccgttcacccaaaggtacatgttggaagttaccgagccgaaatgtgcaaaaatctctttgcctttccagtcagcaggaaggatgatttctttccggtaagagcctacatgattgttttctgtcggtacttgcgggggattgtttttgaattggcttctccaggcatatcctacgttgacatagataggatcaccgtaaccgttcaactcccaaacgccaggcacctgaaggtcatcccaacctttgtcgttgaaattagtttgataaaagtcggtcggtcgtgcatctgcatgtcttacccagttgaatttccacggaccgttcagggtcatgaaattcgttgaattttctttaatgccggctttagcttcatcagccgatgcgtaagcaaagtaattagtgtgcatagcggagcggtttacggaattcacttccgggtctttccactcattgaagctttgtgcttgaattgctgtcagtcccaatgcagccaagcagcaagagagtagttgtttcttcatgggtttttgtattaggtttgaatttcgggagtcaaagatagggaataatttgattaataaaggagaataataagtctaataggtatgtcaatagttcaattttaatttatttatgaactattcaatggagtctggtaatggtatgtggagttggcatagatttacggtgaaagaagaacttggtaaattaactttttgagtatcacctctcgagtatggtaaagtcaagaagaaacgatgaataggctgtatttttctagcgtgacatcctgatactatgagtaatacagctaattttaatgctttttatttcttattttgtactattttgtccctttttagtatgataattgtatcttaaaaactattacaatcacttaatttgtagcgagtgtttttaacaaacctatttcaaattcttaaatttattattatgaacaaactgacgagactaaaaagatgcaagaggtgcatcagtacgttaatgcttatgtgttgttcgctcttggcatgggcgcaaaatacagtaacgggaactgtattggatgaatctaacttagaggtgattggtgccaatgtaaaggaaaaaggcacggccaacggtgctattactgacatgaatggtgttttccatttaaaagtaagcaatcttcaaaaagctgttctgcaaatttcgttcatgggatatgaacctcaagaagtgccattaaatggacgcaaacaactgaaaattattttaaaagaaacggccaatgaacttcaggaagttacagttgtggcctatggtacacaaaagaaagaaactctgacaggagctatttctgctgtaaacaatgaagcgttgatacgttcgccgaatgcaagtgtggccaattccctggcgggtcagattacaggactctcatccgtccagactagcggtcagccgggacaggaagaccctaaggtgtttattcgcggagtggggtccttgacagaaagtgcttcctctcctttgattttggtggatggtatagaacgttcgttttatcaaatggacccgaatgaaatagagagcgtgacggttctgaaagacgcttctgctactgccgtgttcggtgtgcgtggtgcaaatggcgtaattttggtgactacacgtcgtggtaaggaaggcaaagcgaaaatttccgtaaattcttcagttggtatccagatgcccacccgtatgcttgaaatggcagacagctatacgtatgctactttaagaaacgagattataacaaatgacaaaccaaatgctaccgagaacgatttggtgttcaataattatgcagttgaacggttcagattgaatgatgaacctattatgtatcccagtatcgactggagaaagtatctgcttaataaaacatctatgcagacacagcataacctgaatatttccggaggaacaaaggatatacgttacttcatatctttaggtttcttatatcagaatggtctgttgaaacagtttgaaggagtggggtatgataataattataaatacaaaagatacaattatcgtgcgaatttagactttaatgtaactaagactaccacgctgaagattggtatcggcggcattgtaggtaaccggaatgagccgatgattaatgatgcgactaattcgatctggacactgattaatcagacaactccgttcagtagtccgggtgtaattgacggacaactcatagttacccccgaggaacgttttgataataaaataaatctgggcaacagtgctttgcctaaatgttatggaacgggttactcaactgctattaataatacgatgaatctggaccttctgttaaatcagaagttggacttcataaccaaaggattgtcggcggaaataaaaggtgcttataatacgagttatggttttaccaaaaagcgtaaagggcaagtggaacaatttatgcctttctatcaatcttctttggaagatccgtcacttggttatgattcgccagatttcaacaagaatattgtttataagatcaaaggagaaaataagagcttgcaatatgaggaaacttcctcgcgggcacgagactggtatctggaagcaagcttgagatataaccgtaagtttggttttcataatgtcgggggattgttcttgtacaatcagagtaagaaatactatcccgctcaatgggtgggagtaccgtctgcttacatcggttttgtaggccgtctgacgtatgattacaaatcccgctatatggcagaagttaacttcggttataatggttctgagaattttgctccgggtaagagattcggtgcgtttcctgccggttccatcggttatatcctgtcggaagaggccttcatgaaaaaacagaaggtggttgattatctgaaattccgtgcttctgtcggcttggtcggaaatgacaatcttggaaataaccgcttcttattcctgccggattcttatgatgtgaatctgagcggagtagacgggtggaataacaataagtatggattcaactttggttataacagcaaggcgttaattctgggtgcattggagaagcgtctgggcaatccgaacgtgacttgggaaactgcgctgaaacagaactatggattggacgttcatttcttgaagagccgtctgaaaatctctttggactatttcctcgaagaacgtaaggatattctcatcaatcgtaagacagtacctttattaacggggttgacttcatcaattctacctgctgtaaatatgggtaaagtgaaaaaccgtggatatgaggtagaagtgaggtggaatgacaagattgggcaggttcagtataatgttcaggcaaacgtttcctattcaaagaataagattattttccaagacgaggttgagcctaatgaaccttatatgtggcggacaggaaatccggtcgggacactcttcgggtatgtagcggacggtttctatacagaagcggacttcggagagaacggcaaactggtagcaggtctgcccgatccgggtgtgtccgtgaaaccgggtgatgtgaaataccgggatttgaacggtgatgaggaaattacttccgacgaccagactatcattggaaacccgactcgtccggcttatacattcggattgaattatggcatcaattacaaaggctttttcctgacgatgaactggactggtgctgcacaacgctctttgttgctggacggagctttcagagaaccttttggtaatggtaaaatccgtggtttgatgcagttccatgcagatacgcgctggacaccggaaacggctaatacagctactacaccgcggtttacagagacaaatgcagtctataatatgcgttcctcctctttgtgggtgcgagacggttcttatttgaagctgaagaatgtgacaataggatataacttcacagataagaagatgttgaagaaactgggtatccagcagttaggtataaaactgacaggctataatctgctgacttttgataagtttgacatcatggaccctgaatgtaatccgaataatgcggattcttaccctatcattaaaatatataatttaggtattaatctaaccttttaatagtgctgacaatgaaaaactataaaaaatatataggctgtctttctctctctgtattgacactgatagggtgcgaagaccttaaatttggagagaaatttctggataagccgataagtaacgaacagaatatcgattctgtttttaacaaaaaggtatatgctgagcaggcactggcggaaacttatcattccctgccggattatctgccgatgcaaggacgtctgggatatggcgttctggaaatgctaaccgatctgggtgactggacgaaaaagggagcgcctaaattctatacaggaacagtggacggaacaaatacatatctggaacatcttccatatcggttggatgtcgccagtgctacgataggagtagggccggtttatggtattcgaagagcctacatttacattgagaatgtggatagagtgccggatatgactgcggatgagaaagcgataggaaaagcggaagcgcaagtaatcattgcctatcattattctcaaatgctccgttattatggtggtatgccgtggatagaccatgcatatacggcagaagatgcgatgaaatttcctcgtatgacagtggaagaaaccgtacagaagattgttggattactggatgcggcagcctctgtactgccttggcaggtgaatgcagataatgacggacgaatgacggctgcttctgctttagcgttaaagtccagggtgcttcagtttgtggcgagtcctttatttaatgctgaaaaaccctatctggaaggagatgcttcgtctcaattccttacttggtatggtaactattcaccagacaggtggcagaaggcgttggatgccggattagaatttatgcgggctaataaaaagaactcggacgcttatcaactggtgaatacaggtaatccccgcgatgattttgcagcaggatatttcaatcgccataacggtgaagtcttgatttcttccagaagattcaccacttatgctacgggaaagcttccgtttgcccaggtgcgttatggagttgcttctcctacattgacttatgtcgatatgtttcagatgaaagacggaacagaattcgactggaacaatccggaccataataaattccctttctttgataaggacggaaaccccagaagagacatccgcttatatgaaacggttgctgtgaatggagataagtttaagggcgcccagaaagtgcagatttatgaaggagccacccaggcgccttataaagacggacgaatgagttacaatggggttgccatgagaaaattcatacggaacttcaatgacgaagtgaatggtaaattttattcttgtccgttgatccgccttccggaggtttatttgaatatggccgaagcgatgaacgaattgaataaggcggaagtccgtgatgagtttggcaatacggcttatgattatctgaataaaaccagactgcgtgtgggtatgcctgcgatttcggcaacagatgttccggccggcaaaccgttgcgtgaagcaatattacgcgaaagagccattgaattcggctatgaagaagtacgctatttcgatctggtacgttggaaacgcgcagatatatttaccggacaattgtcacgtctgattattaaaaaagcggccggtgagccaagcggcttttcttatgccgtatctcatgcaatggcggaaacgcgtcagtatgcaaaacctgaaaagtggaacgacaagtatttcctgttgcctctgcctatagatgagataaacaagaaatatggattgattcagaatccgggttggtaataatcaaatcgttgaacaataagaagaatgattatgaataaatcactttatatcgtagctttctcgttggcatttgccactacgggtatagcgcaaaataatgaaggacaagataaggtaatcgatctgggcacacagacgaccaccgaattacggaagacacaggctgtctctaccatttattcggatgaattagataaaaatgctaccactagtccttacaatgccatttatggcctgttgccgggattgagtgtgatgcagaacactagttggggcacagataaatctcgtctcaatgtgcggggacgcggttctttgaatggagatacacctttatttgtagtagatggttttgcacgccctctcgaatatatcaacctttcggaaatagaatcaatatccgttttgaaagacggtgctgctactgctctttggggaggcagaggcgctaacggagtggtattgataactaccaaacgcggtatatataaccagaaggatataaaagtagactacaagtttggtttaggcttacctgttaatcagccggaatttgccgatgcttatacctatgccaaagcccgtaatgaagcattgagatatgatggcttgcaaccggacatggatgaggcttctttcctgtccggaggcaatagcgatctttatccgaatgtggactggcagaaagaagcgttacgcaatcatacaaccagtcatcaactggacatcactttccgcggaggtggcaagcggcttcgttatttcagtgtcctcaattacaaaaacgatatgggactgctgaatagcaagtacactgattatacagatcgctataactcccagatgaagaaatacttcctcaatcttcgcatgaatctggatgtggatattacggacgcgacaaaattgaaattgagtatgctcggtatgctgcgagagaccaagcgtcccaccacatcggaagctactttgtttgaacagattttcaacaccccgtccgccgcatttcccgtgcagacacagaatggattctggggcagtaacaatgtgctgaaaacaaatccgatagccaatctggcggacgtaggttattataaactgaatcagcgtatgttgcaggcggatttgcggttggtgcaggatttgtctgtattgactcgcgggttgagtgcggaactcgctattgcttatgataataatgcaacctatcaggaaacagctaagaaaagttttatgtaccagaccattgaaaaaggcatagacggagaaccgatttacacgaattacggaaatcctaacgatgaactggaaatcagcaacaaaggattggccaatcaatacatacatgccaattttgaagcgaaggtcaattatcaccggacatgggataaacatgattttacggccagtgctatgtttcgtcaagaatcaatgacgttgacaggggctaataacagtcgttaccgtcaatacatcatcggaaccgcaggttataattttgacaaccgttatatggtggatatcgtagccaactgttttggcagcagcgtattggggaagaacgacaagtatcgtgcatatcccgccatttctgccgcctggatactttcgaacgagaatttcatgaaagaaatttctgcttttgattatctgaaacttcgtgcttcttacggacgctccggatatgatacttatgattatgacatggataagcaatattgggtaggaagcggtgcttactattttcaggccggaaatacttctgccggaagtagcctgaaggaaggagtgttggcaatggaacaactggatctggaagttgcggataaatataatatcggtttggatatgagcctgttcaagggactgactttttctattgacggtttttatgacaagcgcactaatatcctgattgacggaagtgggctgatctcatcggcaatcggggttactattccgcagatgaatgcaggaaaagtggaaacaaaaggaacggaactctctgccatgtggaaaaaggaatacaaggacttcaactattatatcggagccaacttctcctatgccaaaagtaaagtcgtagaaaatggtgagggatatcagccgtatggctatttgtctaaaaaaggttaccctgtcgggcagtgttttggctgggaggctatcggttatttcagagatgaggcggacataaagagcagtccggtgcagaaattctcggaagtacgtccaggtgatgtcaagtacagagatctgaatggcgataacgtgattgacaacaatgaccagaaggcgataggatattccactgccataccggagatttattatggcattaatttgggatttgaatataaaggttttggcgtggatgctctgtttcaaggagtagcccattatagtgtgatgttgaacactgccagcgtatactggccgttgagaaacaacacgaatatttccaactggtatctgaatgacagaatccgctggacggaagaaacgaaagacatcgcaaatgtcccccgcctgactacgctggataatgccaataacttcagaaacagtacacagtggttggagaacgggagctatttcaaacttcgtaacctgaatgtctactataaccttccttcctcttgggcgaagaaagtgaaaatggagaagattcaggtgtatgcgagagctaacaatcttttttcgctcgatcatgtgaagtatatgaactgtgaagatctgaaaatcaattatccggatatgacttctgtttatttcgggttgaatattaacttctaaaatgtgagatgaccatgagaaaatatatcctattatatacaggtttgctattatccgtatcggggtgtagcttgctcgaattggacgaatcgacaggcttggacagggaagaggcctattcctactttagcaatgtgaaaggtttggctacctacgtttatagccagttgcccggagatctcggagtgctcgacggggctttgagggagtctgcaacggataattctgtttatgtctggagtgataatagtgttcacgacttttataacaatgcctggagtcccaacaatgcagtcgataatatgtggtcgaagtgctatggagctatccgttccgtcaattcatttcttgaaaactattcacaggaaaaactggagcgtttccgctggaacgacacgtatgaagaagacattgccaaagctaccatgtatcgtgaagaattacgggtgttgcgagctttttatctgttcgaactggctaaacgatacggtgatattccacttttgacacgtacgtatgctttggatgaaatcaacggcgtggaaaagacttctttcaatgaagtgataaaatatatctgtgacgaatgtagtgacgcggccaaaactctgcctgtcagtcatcaggacttttgggcggagacgggacgtgtgaccaaaggtacagcgttggcattgaaatcccgtgctcttctttatgcggcgagtttgttgcataatcccgcacaggatgccgataaatggaaagcggctgccgatgcggcttatgctatcataaaagagaactggtacagtttgccgaagacgaatgtagatcctctgtatgacaagaatggtggaaacgatgtattgaaatctccgcaattaatttttgaacgtagaaatggggaaagctttgattttgaagctaacaatttgcccatcagttatgaaaaggggaaaacaggcaacgtgcccacccagaacctggtggatgccttccagatgactaatggaaaagactttgactgggaacagattacaccggggcagaatccgtatgaaggcagagacccaagattctataaaacggtgctttgcaatggcgatacatggatgaactcgaccatccagtcttatgaaggaggaaaagacggtgccggaacaaccggagcgactaccacaggttattatttgaagaagtatatgaatgagactgtttctctagctccttccaatgagaaaaagaaaccgcaccatttcatcatattccgttatgcggaaattctcctgaactatgcggaagcaatggatgcctggaaagacgctgattatacggataatgaccatccgttgtctgcacgtgcggcactgaatcaggtgcgtgctgctgctgatatgcctgccattacaacaagcggcgacgcgtttactgaaagcgtccgtcgtgaaagacgagtggaacttgcgttcgaagaccataggttctgggatatccgccgttggaaaatcggtgataaaaccaaagctatttattgcatcaagatcactatggaaaacggcttgcctgtttataagaaagaattgcttgaaacacgtaactgggatgataagatgtacttatatcctataccacagactgaatattataagaatcctaatttaggtcaaaatacaggctggtaactatgactaagcgaaccctaaaagtttttgtctaacttttagggttcatttttatgggaagaagtccttttctatgtgtggtcccttgttccagttttatgctgcaggatctggagcctcaccgctaccgccttcgtccggattttccggtttatttccccctccatttccagaagaggtgccgccgtttccttccgtcttgtaaatacttacattatccagcatatccttaaatttatatcccggagtaaatacaattttcactcgtcgaacggtatcggcatctacatctttttcctctttctggcttttgcagttcatgcccggacggaaacatccgaagtcacctaattgcacagacaatcctttgtttaggttcgtgttcaacgcatcaatcagtgcgtcaatcacgtgtttcactgcgccttcgggaatcataccgaacatggatacttccttgcataaatctctgaaatttaccgtattggtaattacattctgtgctacatacttttcagtctttgttttgtcaaagccgaaaactcttttcttgacaacatactttaatgccatagtctttcttcttttaatagttagttaatctgttttattgttgttttgtgatcacgatgcaaagatatggtttccgaaattcatgaccaagctaaaaaagaattgtgcgttaataaattagttaataagtagaatgctgctgtattggggaattttatgtaaaaaaaaattggcagaaagatagaagaagaggatgccgatcaagatattggggtgtcaagtgtggggaaggcatcctcttcgaagatagaacgaaaggactacttgcacaagcaatctttttcgctttgttgtctatcttctatatatactggtaaggagtatgattctgaattattccgtatcttctttggttcgcaggctgactaactctgtccacttgcttatacttaagtcgaaccctcctttctccagatgttggagggcggttctaaaatgtcgtattactttttctgtatcattggttgttttatactcaagctctccaagtgcatattcaagacgtgccatttggatgtaatctaacaaggtatagttttcgtcaacggataaagttgaaagatagttcaacaagtcgaatgctttttctcgttcttcatctgataagttggagatggggcggcgcgcgatagggtgctgcattaatagaataatgttttctttcaagtcatcgtacatatctttgttatgtttgtcgcatcatttccctgtggtgcgcggtttaaaaaagagagcgtgggaaactaccaactgtacgccaaccataggctcggcaaagaccctccgcgacataagtgatagtcccacgcccattgggtatataaacaaattatatacagaagtgtgcacgagacctgacatcacttattgccattcgcggtaaatttttgccgaatttatggttgaatgcaataaataatcgttctctgtaaaaaaataaaatgttcctctctacgtatgaaaggaaaccgctacaaaagtagcaataaatattgataaagcaagtaatcttgttttataatttcatagatagttctgatttactaaaagtcagtataaatatgattaatataaaaagaaccctacactgaattattgtttttttgttcagttcagaattggaattctaggtaattctgctagatgattttaacttaactttctgttttctttgcataaaccacctgtttgcctgttccataacggattaagagtccacgttcgataaaagcattcagttctttcaaagcacgttttttgtcgtgtcctgtcaatcggctatagtcggtgcgggtcaggcagggatatttgttcagatgctggttgattattgtcaaacattcttcttcactgtgccctttcccatggtgacgagtcatcgattctccacgttctagtctcatttgctggcctacttctttcttaaactggctgcctacccggaaattgacattcttcagctcaatagattgtgcgtgcacatcttttttcttcattacacgaggtccctttaaagacactgaaaaatatccgatatctcccagttccacaatccatccgttggcaatcaaatctctcaactcgttttggaaagactgcatggcgcccgccagtaaactgcggcttattcctgtgaatttgtgtacacggtctagaaattcttcctgatcaacggttcctttgaatactacgcggggatgaagcggttgtgcgtcgcctgtttgttgaatgtcaggcgtgtcgtaaaggtcatattgtatactcatattcgtttttatttagtgtaggcacattgataaatccgtttgcctatccggatttacttcacttgctacttttatttcgttccactatagtttctctttcgtcccactatagtgctccgcaagggaaactatagtgttctttgcggaacactatagtggaacgaaaaaagattaggcaacaaaggtaatctctttaggcaataaaactaattatattagcaggaaaaaaataaaaacgtcgcaaatattgtttattaccttaagtcaccctttccttttttaataaattagctagaaagtgtggtgtttattgaataagaacgcttatttttgcagcatgttacaatttgagaatcaaaagataaagcaaatagttcgcaaggtgcttccggtagtaacgctgggagctatgttatattcctgcgccagtattggacggccggacggaggcccttatgatgagacgccgccccgtttcatcggtagtactcctgctgcgggcgctctgaataatgaaaggactaaaatttctttgatgtttgatgagtttattaagctggagaaagcaaccgaaaaagtcgttgtttctcctccccagatacagcaaccggaaatcaaggcttccggcaagagaatacaagtcaacctactcgactctttgaagcctaacacgacctatacgattgacttctcggatgcaattgtcgacaataatgaaggtaacccgctagggaattttgcatttacgttctctaccggtacggaaatcgatacgatggaagtagcaggaacgatgctcgatgcctctaacctggagcctattaaaggtatgcttgtcggactacattccaacttgaacgattcggctttcaacaaattgcctttcgaccgtgtggcacgtacggacagccgtgggcgtttctctatccggggtatagctcccggcaagtatcgtatctacggtttgatggatgccgaccagaacttcacttttaatcagaagagcgagaagatcgctttccatgactcgttgattatccctcgtatggaagaacgtatccgcatggatacggcttgggtggattcattgacttatgacacgattgttgagaagaaatatatgcattatttgccggatgatgtcatcctccgtgcctttaaggaactcaattattcgcaataccttatcaagtcggaaagactggttccgcagaagtttacgttctattttgcaggtaaggcagatactttgcctgtattgaaaggcttgaacttcgatgaaaaggatgcttttgttatcgaaaagaatcagcggaacgacaccatccattattgggtaaaagactccctgctctttaagcaggatacgctggccatgagcctgacttatctttatacggatacattgaatcagttagtgccccgtacggatacgctcaacctcgtttcgaagcagaaatataagaaagaggagccggataaggacaaaaagaaaaagaagaaaaagaaaggtgaagaggatgaacccgaaccgacaaaattcttgccggtaaatgtcggtgctccttcgtcaatggatgtatatggttctatctctttgagttttgaagaaccgatagccagtttcgatactgcggccatccatctacggcaaaaggtagatacgctctggaaagatataccattcgactttgaacaggactctgtgaatctaaagaggttcaatctgtattatgattgggagccgacactggaatatgaattttcggtagactcgactgcgttccatggtatatacggattgtttacagacaaaataaaacaagggttcaaggtgcgtagtttggaagaatatgccaaaatcacgtttgtggtgacgggagcggaacctaatgctttcgttgaactgttggatgcgcaggataaagtggtacgccgaagaagagtagaggaaggaggttatgccgacttttattacttaaatcccggtaagtactccgcccggttgattaacgaccggaatggaaacggtgaatgggataccggcaattttgaaaaaggggtgcagcccgaagaggtgtattattataatcagattttagagccgaaagccaactgggatctagaacaaagttgggatattcatgcagttccgctggataagcaaaagctggatgaacttaaaaaacaaaaaccagatgaagacaagaagaaaaaggatcgggaacgaaatagtcagaaccgccgtcgttagcgttcggcgcaattttattatcggattagtggccttactgatgggagctttcgccctcccagccagtgctcaatgtgaagcgaagaatgatgcgtttcaatccggcgaacacgtaatgtatgatttatattttaactggaagtttgtctgggtgaaagccggacttgccagtctgacgacgaatgctactacttatcattcacaacctgcctaccggattaacctgcttgctttgggcagtaaacgggcggatttctttttcaagatgcgcgatacgctgacttgtgtgatcggtgaaaaactggaaccgcgctatttccgcaaaggtgccgaagagggaaaacgttacacggtcgatgaggcttggttctcttataaggacggtctttgcctggtaaatcagaagcgtacttaccgggatggggcgtttaatgaatctgaagatagtgatagccgctgtatatacgatatgttgagcattctggcgcaagcgcgttcttacgaccctgcagattataaggtgggagataagattaagttccctatggctacaggccgcaaagtggaagaacagacgcttatttatcgcggtaaagaaaatgtaaaagcagaaaatggagtgacttaccgttgcttgattttctcattagttgaatatgataagaaaggaaaagagaaggaagtgattactttctttgtgacggacgatttgaaccatcttcctatccgtctggacttgttcctgaatttcggttcggcaaaagcattcttgaataatgtgaccggcaaccggcatccgctgacttctatcgttaaatagagataaagagaaaaaatagatagggctgaaagctacctttgcgggtgtactttcagccctatctgttttttattcctgaatttcgaaaggcactttctgatctttccggaatacgctggattcaaaagtggcaatcaaatctccgttctgattcgttacatctacctgatagcagcctgtacttcgaccgatgtagcgttcgcgtgcttcggcaaaaagggtgtcaccaggtccgcttgcgcgtagaaaagtgatgctggacgagagagagaaagccagtgtaccgtgcgagttggctgctgcggccagtgccaggtccgccaatgtgaaaatggctcctccttgtgtacgggcgcctgcattaagatgttctggttttatttctaacttggctttactgtatcctttgcgtacttccagcagtactactcctgtattttcggcaaataaatcattcttaaagaaatcttgtggagtcatatgagtttgtttaaagttgtcaacatttgtatctctaggtgtgattcatctttataaatctactatttcttttgcaaatgtaccaaaattgtctttcatttggattatttgggtcggtcaattctatttaaatgcactacttttgccattaagaaaattaatcacttaacaaataatccatgtattatgaaaacaattcttagcgcattaggagtttcccttttgatcttaacgagttgcggtggacaaaaaaaggttgaagtagactttattcaggacaacatcgacaacgcagttgcacaaaacacgattcaaacggatattatcgaaaaatccggtaaaattttgaatccgagaactatcaataaagacggtagtatatcttatatacctattgatgactggtgttccggctttttcccaggcagtatgtggctgacatataacctgactggagatcagaaatggttgccgttggctgcgaaatatactgaagcccttgactcggtgaaatatctgaaatggcaccatgatgtaggtttcatgattggttgcagctatctgaacggctatcgtctggcaaacaaaaaagagtacaaagatgtaattgttgaaacggctaagtcgctttccactcgtttccgtccgaacgcaggcgttattcagtcgtgggatgccgatagaggctggcagggaacacgtggatggaaatgtccggtgattattgataatatgatgaatctcgaacttttatttgaagcaactgctctttctggagattctattttctataatattgcagtgaaacatgctgatacaacgatggctcaccatttccgaccggacaacagctgctaccatgtggtagattatgatccggagacaggcgaagtgcgtaagaggcaaactgcgcagggatatgcggatgaatcggcttgggctcgcggacaagcttgggcactctacggatatactacttgctatcgttatacgaaagacaagaaatatctcgaccaggcacaaaaagtatataattttatatttaataataagaatatgccggaagatctcattccttactgggattacgatgctccgaatattccaaacgaaccgcgtgatgcttctgctgccgcttgtacagcttctgccctttacgaactgaatggctacctgccgggtaatcactacaaggaaaccgctgataagattatggaaagtttaggctcgcctgcttatcgtgcgaaggttggaacaaatggaaactttatcctgatgcattcagtaggtagtattcctcacggtcaggaaatcgatgtccctctgaattatgctgactactacttcctggaaggactgatgcgtaaaagagatttggaaaagaaataaggaataagaaataacaaaaaataatgaatggtaaacagtgaacgatgaatactctacagattctgacgtaacatgtttaccgtttatcattcagcattggctatttattattcccttcttatcatttatcactaacctgttttaatcatttatcataaaccatcatgaataaacctataaaccttcttgtaggaggcttgacgctctttgccgcacaaggttgcaaggctccgaaacaagcgtcccaacaagcggagcatcctaatataatctatgtatttcccgatcaataccgtaaccaggcgatgggcttctggaggcaggacggattccgggataaagtaaactttgaaggagaccccgtgcatactcctaatctggatgcctttgcacgtgaatctatggtcttgtcgtctgcacagagtaactgtccgttgagcagccctcatcgtggaatgttactgaccggtatgtatccgaacaaaagtggtgtaccattgaattgcaactctacacgtccgatcagctccttgcgcgaggatgcggaatgtatcggcgatgtgttcagcaaagcaggttatgactgtgcttattttggtaaacttcacgctgacttcccgactccgaacgatcccgaacatccgggacagtatgtggaagaaaaacgtccggcatgggatgcctatacaccgaaagaacgccggcacggctttaactactggtattcttacggaacatttgacgaacacaagaacccgcattattgggatacggatggtaagagacacgatccgaaggaatggtcacctttgcacgaatcaggcaaagtcatttcttatctgaaaaatgacggtaacgtacgtgataccaagaaacctttcttcataatggtgggcatgaatcctcctcacagcccgtatcgctccttgaatgactgtgaagagcaggattttaatctttataaagatcagtctctggatagtctgttgattcgtccgaatgtcgatttgaagatgaagaaagcggagtctgcacgttattatttcgcttccgttaccggagtagaccgtgctttcggacagattttgacgacattgaaagaattgggattggacaagaatacagtcgtaatctttgcttccgatcatggtgagacgatgtgtagccagcgcactgatgatccgaagaattccccttattctgaatccatgaatattccgttcctggttcgttttcccggtaagattcagccgagggtggatgatttattgctctccgctcctgatattatgcctacggtgcttggcttgtgcggactgggtgattctattccggcggaagtgcagggacgtaatttcgctcctcttttcttcgatgaaaaggctgaaattgttcgtcctacaggtgcactgtatattcagaatgtagatggcgataaagatgaaaatggattggtgcagacttacttcccttcttcaagaggtatcaagacggctcaatatacattggcgttatatatcgaccgtgatacgaagcaattgaagaaaagcctcttattcgatgatgtaaaagatccatatcaactgcataacctgcctttggaagaaaataaggagattgtggcacaactttgcggtgaaatgggagctatgttgaaggaaattaatgatccttggtatacggaaaagattctgtcagatcggattccttattagcgattagtaatttataaaacgctgattaactcaaataagtgccaattttaggagtaaatctctgcgacaataataggtgttaatccgcatccgcgtttaaattgaaaatagtaatgaaaaacagttgttttatagtattattccttttgggaatcattccttcagctttcgctcaactcatcggatttgaagaagaagtgcccgaagcatttacagtttccggaaagggagaagtgaaaatctcttctcttttttacaaagagggtgaaagtagtctggaatgggactttcagcccggttctacgctggatgttcaaattgctcctttatcgttgaatacgagaaacgagaagcagttcggcattaccttgtggatttataatgagaaaccacagcaggattctattcgttttgagtttctgaataaggagggagaagtctcttattggttctcttatcgtttgcaggcagcaggttggcgggcttgctggatctcttttgagtatatgcagggcgacaagaaagataagaagatcgtagcctatcgactggttgccccgcaacggaaaggacgtatctttcttgatcgtttgactttccccgaaaagaaaatgaatcttcgtactactcccgaccagcagttgcctgccaataatggattgtctaatcgtgacctatggcattggtgtctcgtgtggaaatgggaacaacagtcgtatgatatccctctgccttctaaattgtcaagcgaacaaaagaaagaattgaagactatcgaacaacgtttgactgactttctggaagtgaaaaaggctccgcaaggaccgattaatgctgcctataaaacatttgagaaagcggctatcagtccatccatcgccggaacgggatttataggaactcctattgttgctcctgatgaacaggacaagaagaaaggagaaatgtcatggaacgatattgaaacgatgctttccggttttgcctatgatgcttgttataaccagaacgaaacatcaaagaaaaactactttaccgtattcgactatgctatcgatcagggatttgcctatggtagcggtatgggtaccaatcatcattatggttatcaggtacgtaagatatatacaactgcctggctgatgcgtgatgctatctataaacatcctcatcgggatgcttatctctccacattgcgtttttgggcggctctgcaagaaactcgtcagccatgctctccaacacgtgatgaattgttggattcctggcatacgttattgatggcgaaatttatttccgctatgatgtttcccgatgcaagagaacaggcgcaagcgttgagcggattatcacgttggttatcttcttctttgcgttatactccgggaacgatcggtggtataaaggtagacggtacgactttccatcatggcggtttctatccgggatataccactggagtacttgcgactgtaggagaatatattgcatttaccaatggtacaagttttgaactgaccgaagatgcgcgcaaacacatgaaatcagcctttattgctatgcgcaattattgcaatttctatgaatggggcatcggaatcagtggccgtcatccttttggagggaagatgggaagcgatgatatcgaagcatttgccaatatcgctttatctggagatttgtccggtcagggaaatacgtttgatcgtggtctggctgccgactatttacgtctgatacgcaatagtgatactccgaatgcgcgtttcttcaagaaggaaggtattcaaccggcacaggctccacagggattcttcgtttacaactatggttcggcaggcattttccgtcgtgcggactggatggtgacattgaaagggtataccactgacgtatggggctctgaaatttatacgaaagataaccgttacggacgttatcagagttatggctccgtgcagattatggggaaaggaaatcccgtgtcacgtgccggaagcggttttgtgcaggagggatgggactggaaccgtttgccgggtacaactaccattcatttgcctttcgatttgcttgatagcccattgaaaggaacgactatggcacgctccaaagagaatttctccggaagcagttctttagatggtaaaaatggaatgttcgctatgaaattggcagaacgggattatgagaatttcacaccagactttgtggcccgtaaatccgtattctgttttgataaccggatggtttgcctgggaacaggtatttcgaactccaatgcggattatcctacggaaacgactcttttccagacaaaatataatggtaaggagcccaaagtaggagaggataactattggcttcatgatggttatgacaattattatcatgtagtggacggaaccgttcgcgcacaggtggcagaacaggaatcacggcacgaaaagacgcgtgaagttactaagggaaaattctcttctgcctggatagaacatggcaaggcaccgaaagaggggacttatgaatatatggtattgatacagccttctgcttccgatctcgacgaactgcgtaaaactcctgcatacgaggtgttgcaacgcgatcagactgctcacgttgtttatgataaaaagactggtatcacggcgtatgccgcttttgaagcttatcagcctgccgctgataaagtggtcgtcgctattcctgcggaaacaatggtgatgtatgcaaaagaatctgataagggtatccgtttaagcgtctgtgatccgaatctgaatatagaagagaagacgtatacaacgaaagagcccagtcgtcctattactaaggagatacggcttaaaggacattggagattgacaagcccgatggaaaatgtccggttggaacagcagggagaccagaccgtactgacagtaacctgtcagcatggacagccggtcgaaatgctcatggaaaataaataattagtgaataagataagagaaaacaagaatttaaagagaggtattagtcatcatgtttctatgaaaaaagagaagaccggttcatggggagccggtcttctttgtatttacacggtgcgttgagcactttcttttcttgttacttattcagtctccattcgaaaccgtctttagtatctttgatttcaaatccgagtgctgtcagtgcgttgcggatttcgtcggaagtagcccagtctttgttggctttcgctttcatacgttgttccagtaacatatctactaccttgccgtaagctgcttcacgaccatctgaagagcctttttcttctttcaatcccatgatgtcgaaactgaacagatggaatgtttctttcaggtctttcaggtcttcggcggagatggtggcattaccggcaatgatattgtttataatgcgggcgccttcgaaaagctgtgcgatgacaatcggtgtatttaagtcgtcattcattgcttcgtagcatttagcgcgcagttctttcacgttgattccctctgaagttgccgatgcgggagtaatcttatccaatgcgtcaatggcttccatcagacgctgcaggcctttttcggatgcttgcagtgcttcattgctgaaatctaccgtgctgcggtaatgagcttgcaggatgaagaaacggattgtcattggtgtgtaggcttgtgccagcagcttatgagtaccggtgaagaattcgtccagcgtgatgaagttgccaagtgatttacccatcttggttccgttgatggtaatcatgttgttgtgcatccagtagtgaaccatgtcatcaccttgtgaggctaccgattgtgcgatttcacattcgtggtgagggaaaatcaagtccattcctcctccgtgaatatcgaagtgttcacccaggtatttgcgtcccatagcggtacattcggcgtgccatccggggaaaccatcgctccatggagacggccagcgcatgatatgttcaggttgtgcctttttccaaagggcaaagtcggcgggattgcgtttctcgctttgtccgtcgaggtcacgggtggtattcaagacgtcgtccagattacgtccggaaagttttccgtagtggtaatctttattgtatttggctacatcgaagtaaacggagccttcgctttcataggcgtatccggcatccaaaatcttctgtaccagttggatttgttcaatgatatgtcctgaagcatgtggctcaatgcttggagaaagtacattcaacgcttccattgctttatgatagcggttcaggaaatattgaacaacctccattggttccaactcttccagacgtgctttcttggcgatcttgtcttctccgtcatcggcatcgtgttccagatgacctacatcggtaatatttcgtacgtagcgtactttatatcctaggtgggtgagatagcggaataacacatcgaaggttatagccggacgggcgtgtcctaaatgggcatctccgtaaacagtcggtccacacacatacatgcctacatgaggtgcatgaagcggtacaaacaactctttctttctatctaaggtgttgtaaatggtaagttgatgttccataacattttatatttgttttattggaaccgcaaagttagtataaaatctgaatatgcgccctatctttaatcggttgattttaagtgtcgggtcgtttttaccagtaatgtgatttgtttcccggtatgaaactaacagtttcacaccgaggaaccaatagtttcattccttgaaaccaaaggtttctcaccgagaaactaaaactctgccggcatgtcagtaaatgtttggctattgttgattgcaaaacttattgattgcttcggctacaccatcctcttcgttactcagggtgatgtaatctgctgctttctttacaggttcttgagcatttcccatggcaatccccagtcctgcaaacttaatcatggataggtcattatagccatcacctatggctataacttcttcacgtgctactcctatttcttttaacaggacggccaaagaaagagccttgtcgataccttgcgggactaattcgagaaaatagggttctgaacggaaaacattaatgcgaccttgtaaccggagacaaagttcggcttcaagtggaatcagtttatcggcatctcctacgatgaggcatttggctacgggaagcgtgatgtctgtcaggaagtcatttgtctcccgaactgccattttattgagaaaggcttcttttaatacgtatggatcttgagagttttcggttattatctctgctccgtcataggttaatatacttagttgatgggtacgggcacattcgtagagcactggaacaacttcattaggcaacacattttcatataccatctcttgtgtttcccaattaatgatttctcctccgttataggacaggatgaatccaccgaattcattcatacgtaactcattagctaatggcacaataccataagtaggtcgaccggaagctaataccagtcgtattccttgctcttgcatacgtatcagagtttccctgttgcggggagtgatttcctttttagagttggtgagtgtgccgtcaagatcgagcacgataagtttgtatttcatgtagggttgttttggatgcaaagataaattaaaaaagtttttctgcaaggtggtgggggaaaagatgtggctttagctgaaattgcactgtgaaagtgcaatttgttttgttatttgcactattatagtgcaaataatcgtatctttgtctataaaccaatgctatatggataagttatttgagtattttcacaagatgatacgggagactaatattgagtttcaccggtatatttattccaggataaattggaatagtcgcatgatagggcttacgggacctagaggagtagggaagacgactcttgtattacagcacattaaagaaaagctgaatttaaatgactctttatatgtgacggctgaagatttttattttgccagccatcgtttgcttgacttggcagatgcttttgtaaaaatgggaggcaagtatttgtttattgatgaaattcataaatataaagattggtcgaaagagcttaaattgatttacgattatcattcagagttgaatattgtttttacaggttcatctgtattggatattaataaaggagcttcagatttgagtcgtcgcgctgtcatgtatcagatgcagggactttcttttcgtgagtatttgtatttatttcatcgtattccttctggaatatacagtttgcaggatattgtagcgcataaagtggaaattccgggtttggagcatccgcttccactctttcatgactatttgcagaaaggctactatccttttgcattggaggaagattttgatatacgtttgcgacagatcatcaatttgactttggagtcggacatacctcaatttgctgatatgaatgtttccactgggcgtaaacttaagcaacttcttgctatcattgctaagagtgtgccgttcaagcctaattttagcagtatagctaaaattcttgaagtgagccgtaataatatatccgattattgcctttatattgaagaggcagggttgatagcgcagttgagagatgctaccggcggaatacgcgggttagggaaagtagataaaatttatctggataataccaatttgatatatagtctggctcaagataattctaatattggaaatatcagggagactttctttttgaaccagacccgtattttttcggatgtagtagcttctcctgtttctgatttcttgattgatgatatgacatttgaggtgggaggaaagaaaaagggacaaaagcagattcaggaggtacagaaaggatttgtggtgaaggatgatattgaaagaggctttatgaatgtggtgccgttgtggcagttcggaatgggatattagtcaataaaaaaaggatatccaaattcggatatccttttttattgatgttgtaatgttttcttattctatgtttgctccgtatccatccatatctgttgccaagacaaatataccgttttctacatcagtaatggtcagtggtgcagtggcgtgaggagtcaatacataggggtcaactttcgcacttgcatcacagttgctatggtaattataccatttactgttacttgttaatccatatacgatattatctttaacatctactgtagttacacttacaggatgagtatcatttcccacgtaagtataaaggttgctattctttgcaaaacttgagtctacataaaagatgttttttgtcatcgtgagactacctttattatgtctgaaatatggattgtttcctgcaatattaattactgtattattagatattattgcagtaagatttccttctgtaaagtctgtttgtaatccccaattcaatatttgacccacataaggtgttttactgtatactatattattggtaaatgcaaatttcttgtatggagccaagtttttggttgtatatagatgtatgagagctttgttgtctgcattgaccataatacgagttctattaataatgatcgtattgataccattcaaattgtcttttgctgtatcttgataaattgggtttttaacgtcgctgatcttacattcatctatgatcaaagctgtgaaatcagtagcacttgaagtattcgaattgttgaaatattgtccatcagtagtgaaactactcatatctaaatgaatattctttatgaagatatttccagagactgttttccaaaccctactaggtttaatgacaggtttagaatcagaatatttcccaatgataataattgtattattaaggtttacaggattgattgttgtaaaatcattatttcctgttaagaataagattttgactttcttggaattattgatatagctgtcaagttctggttctgttccatccaactctactacttctgcatcgggataagtatttttatcaaatgtgatatcaccgattgttatactttctccgttatcgaattttgctttatagtcaatccgtgtttctgcttctccaagctctacctgtatttttgcgatggcagcatatgctcctgaagttgcaagaatagatacgtctttggtattatcagcgacggcacgcgatagagtttttgctgttgcaggagcttttattgtcaatgttccttcatcgttatctgcggacggttcagacaaagtcgcttcccaaccttcgggagcggtaatgatataagattctactcccttcatgtgtacaatgaaatctttcgtagatcctgctgcgattctttgtatacctacaatactttcatcaaacttgcagtagaagttgctgatgatagggatagataactttgtgccatctcttaattcaatattgaagttgttgccaaccttttctacagagttgaaaaatttatcttttacggcttccccgtcggttgcttttacaggattgcctgcagagtcctttacgttctcataagtactaccgtcgtagctgacttgccagtatcctgttgctgcatcgatttggaaaagaggagtctttccattttcagccgttgcttttataggattcccgcttttatctttcagttgtgtgaaagtgcttccgttgtcatagcttaccgtccaataaccatcgttgtcgatgcccatttgaggaatcaaggcacccgctccggtttcttcaacgagtttgagtgtcttgccattacttaatgtaatggtatatataccatcctttaattcaatatcagtaatggtagcgccttctttgcaaagttcgcgtacggcttcaatgttccagttcaaatcttgaacggttttttcaagggcggtaacacgagtctttaaatcgttaacgtcgtcccataagtcgtctgtcttattgcatcctaccagacatacagtcagtaacatacatacgtaccaaagtttcttcataattgtatcttgtttttaaagttattactggagtgaatttaaccaagccggaactgcacctaaacgtttgcgtaattgggcttcatagagtgaatatggagtaacggtattaccctgttcttcattcaacttcatttggctttcatcgaaatgaatactaccgccatgatatcccactacgataggaggaaggaacttccaccaaagagaattgttgtcccaccagatgaatggagaatccgcaacattgttcttggcattaaagttccacaaagtcaaatcggctaagtgattaggcatttggttgtaatcacctccctggcggaatctcataaaaccacctgtacaacggtcaatcagcgttgcacgaggttgtgtggcatgagactcaaagcaaccgtcagttccccagtctacattccaaatgacagcacctatactttgcttggatacaccacatgcgtggtattggcctgctccttgttcgtatacatttttgttatctataaggaatccgtttgatttgtccgtcactttgcctataaatacgcgtgacgaggcttgcgaacggatagctgcgtgaccacggtttccgtcaatgaccacatcgtatacggatacattggaactgttgacgatcgaacttgcttcgctgacgctacgaaagcccacgcggcgcatccatgaatttgtcaggcgaataagattgataggcttgtaggctccatcgtcctcccatgaaccgtgatgagtaaagtcaactttagcttttccttcaaaggtcatatcttccacacctacattctcatagtggggatatttttggatagtccatttccattgtggatctacagcatgcatgattggctctttgaaagtaacagtttgcccgtcgatggctgctactaaatgataatcgaagacctgtacgccatcttcatgtagattagtcatgtttgaagtgggttggtaaggtgctaattctgctttgataagttccggactattatcagccagttgtaaacatacccaatctccgactttaatacctgtggtggaggccacttctactgagaaagtccccttttcggcgtttcccgtaacctcggtaataggggataatccactattatgcttgatttccagcatgacaggtgaggaatacatgacacttggattggtcggttggttaggggcatccatttttatgacagtttggtcgcgtccgtcacctttcaggattactcctcccattaataactgaattgtttgtgattttccatctacatcatcggctgccgtatgcagaatgtattctcctttaggaaaatagattatcgccttggcattgtccacttttgagcctattttggctaatattttggttaaggcttcccggtcggacttgccgtcattgggaatagcaccgtaatcttttacattatatacagtgtaacctaaagaccatacatcgggaggtgcgacttcaccatgtttataaccagcataagagaaatctagcagtacattatctgcttgtcctaagttaaatttgttccatacatcacatgtgttggcatcatagcctgttgtcagtagtcgtactttgaaagatattatgcggatatagtttttagaagaagtaataataatattgattgtttcttctttattctctatatcatttgctttcggtgaagtaatggaaagttcattatcttttaaaacgacattccatccttgtggagctttaatcaccgctcctgtaacatcttgttgttccacttcataaaggcgtgtttcgtttaacgggaaaataggagtgttttccataccttttatctttagatagaatgtatcgatcacttgaagttcaatggtcttatcgctaccatatataatggttagtttcttgctggtagtatcatattctaccttgtcaaagatcgaattttttccggcactttcaatggcttcaattttgctgccgtcattattggtcagatactgataagtttttccattatcatagctaactagccaatagccttctgcatctacttttagtttaggagattgaatagggttggacggcccgttaggatcggtcggcttactggttggaatggcatatatcttattgccattagcatcttttagaggcatgtaggtggtgcctccatcagtgctataaatccagtatccttcgttatctacggataaagtggggactagcgcattaacgttttctccactcatgacggtgatactttttccgtcacttaattctacagtatagccattttcgataggtgtgatacccacgatgaccggatcatttaataaatactgtaaactttcgatagaagtgttcagttgattagctgtttcttccaatacttggacgcgattttttagcgaatcaatttcagaacgcaggtcatccgtttcttggcaagattgcagaacgaatagcatgctgcaaataccaaatagtaataggtaggtaatgctcctgtttttcatacgtttattatttcgggttatttataattttcacaatggcaaagataaccggataaaataagagtatatggataaaaaaattcaggaatacgatgaaataatacattttacacgtctctgtgatagattgcgactttatgtattattagagcaggtctacccattgctcgttgcttaatataggtaatggctcactatcggtaacaaatgtttccgctagttttcgtttctcatcttgtaggtgaagaatcttttcttcgatactgttttgggtaatgaagcggtaagcaattacttgcttgtcctgcccgatacgatgggcgcgggcgatcgcctgcgattcggcggcaggattccaccaggggtctatgataaatacatagtcggcttgagtcagattaagtcccacgcctcctgcttttagtgaaatcaggaatgcctggacgtctttttgatcggtgaaataggcgatttcggaaggacggttgttggtcgatcctgttaataaggcatatttccaaccccgttcgtggaaagcttcggcgagcacctccagatgtctgacgaatgaggagaaaattaaaactttgtggccttcgctctgtagcgtatcgaatgtttcgattatctgtgccgtttttccggatgttccggtatagtcgggaaggataagttgcgggtggcaagatagttgtcgtaaacgtaagatgccatttaatacactaaacgaatgaagcctgtcggtactttgaggatgctgaagaaggatgttgcgcaggctgtttttctcctgttcgtaacaagtattctgctcttcagtcatgtcgcagtagatggtctcttcggtaagtgccggaagttccggagctacctctttcttgcttctacggaggataaatggggctgtcagttgttgcaataatacttttgcacgggcattcccctgacgaatcggcattataaactgcttttggaaagcattttccgtacccagtaagtctggttgtataaagtgaaattgagcccacaggtcctttaatgagttttcgatgggagtgccagtaagtacaagccggtgtttactttgtagtcgaatggctgaccggaaggtgagcgattcgctatttttgatattctggctttcatcgagcacgatgtattcgaaacggtatgaacagagtatatcaatgttattcctcatcatgccatacgtcgtaaagatcaagtgaaaatgaccgaagaatttttccggttgttccttgtctatagccatggtgttgttgtattccgccatcgagagtgctgtaaagcgtttggcttcccgtcgccagttatgaagtagcgatgtggggacaacgatcagggtagccggttgtctgggggtagatggtttatatatatactgtaatagagtaagagtttggagtgtcttaccaagccccatgtcatctgccaggcatccgccaaatccttgtttatgcaaatgtaccatccatgagaatcctttctgctgatagggacgtaacgttgctttgaggtttttgggtacggcaatattttgtatctgttgcttcaccggaaatttctttaattcctcttcacctaaggcggtctgtgcggcacctacaaatgtatgtttcaagcggattcctttttccgtttgaattcccatctctagtaaattcgcatatttgctgaaccattcctctggcaggagaatcatgcggccatcaggtaacagatattctctcttttcctccaggatatgtttgcggaagcgtgaaaaaggaatacgcagattgccgataacaacggtgatgtgcaattcaaaccagtcgacctcatcgtcacaactttgctcgatgcgtatctcgtccaggcaataaggtgtgtttcccatattgctggtgagatggaaggactgctgcaacatctcccgatggctgttgatccattcgacgatcgttttctccggagcttcaggggataggctgaaatgtgtattattgagttgttgcaggcctgcatccgttaagagctgaacgacttgttcttcagcagtaatgttccggcgaaaaaagaagatttcaccggatgttttccgataaatgatttttttcatttcaagggcactatccgatgtaaatgtctgatctccataacggaaaccaagctgcaatgcttgtccgttgtacgtggtatcttcgaatgagagaattgcttcacaggggcatttctcttccattatactcaaaccgtgagtctcgatttcatgataacgagcaatcgggataacaatgttatctatgtatttttcaatttgggaagcgtctacgctgatcgatcttttctttgtaaaaggtaagatgcgtgcgctttcaatgtgcggaaagaaatatagctccattcccaataatagcgtggctggtgcggatgtcagtacaaccacaggtttcaactcacttaaagagaatggctgtccttcataatagcactgcaactgataacgaaacgttttattgtcaacatgaaacgttacacgaatttctgcattatgaggatttatgtgataggcatgatgggcgtatagtattttactgccggcttgtttctgataaaaaggcagtccgttgtcccgtatcagtatcagcatttccaacagtttcttttcgatagatggacggatatcattctttattcgttccggatcttcggataatttatgtaaaaaacgcgatactgttttttcgcgggagtagacactcattagatgcttctctgtataataagaggcgatatgaatagcttgtctttctgcctcactcatcttgctcatagcttcgggagaggcgtgaaatgcttgttctaccaattgcaaggtaccatcgtccagcttttccgcaatatagggaatcagcaatatgccgagtatcggatgctctgtgaaaacgattataacttgtccgttagttggtctctctttcattctcttttagactttaacaaacaaagatacgggaaaatacttaattttgcagcatgatggaggaaaacaaacgagtattgcttggaatgagtggcggtacagatagttctgttgctgctatgcgattgctggaagccggttatgaagtgatcggagtaaccttccgtttttatgaattgaatggctcgacagagtatctggaagatgcccgtaatctggcagaacgtttaggaatacggcatataacatacgatgcccgtgaaatattcagtaaacagattattgaatattttgtgcaggagtatctggcaggacggactccagtcccttgtatattgtgcaataattacctgaaatggcctctgcttgctaaaattgccgatgaaatgggcgttttctacatcgctaccgggcattatgcacagaatatacaactaaataataccttttatataacatacgctgccgactcggataaggatcaaaccttctttctatggggattgaaacaagatattctttgcaggatgttgttgccgatgggggatattacgaaagtggaagctcgtgtctgggctgcggaacatgggttccggaaggtggcaactaaaaaggatagtataggcgtttgtttttgcccaatggactatcgaacttttctgaaaaactggttggctcaaaataatgaggcattggcagaagaagagcagatgatgggggagaatcaagcattggttggagattggcaagtattggttggaagcaatcaggcaggactcaataaagtgaaacgaggaaggtttgtcgatgaaaagggagattttattgcctggcatgagggttatcctttttataccattggacagagacgtggcttgggcattcatttgaaccgtcccgtatttgtgaaagagattaatcctgaaaagaacgaagtagtattagcttctctttcagctctggagaaaacagaaatgtggttgaaagactggaatcttgtcaatcaggagcgtactttagggcattctgacatcattgtgaaaatacggtatcgcaaacaggaaaaccatgctacgattaccattacaccagatcatctactgcatgtgcaacttcatgagcctttaaccgccattgctccgggacaagctgctgcattctataaagatggcttattattgggaggagggataatagtcaacgcccggtaattagccgacataatttaggcacggattacacggataaacacggaaagagaataaactttatccatgtaattcgcataatccgtgcctggaagaaattggagaggtgcttcgaaacgctctccttgtacaagcaatctctgtaataaggataacttgtgtcggttatgtcttggtttttggttattcttccgaaggaatactgtcattcagcgctaacattgtttctatatattcgcgcgtattgcttaatctggggactttgtgttgtcctcccagctttcctttctgtgccagccaatcatggaataatccctcacgggcaacgatcacttccaatggttgcaaagctatgtctttccatcgtttcgcctcataatcggagttaacctccttcagtgtggcatcaagtatcgctgcaaatttttctactgaatccggcatcttagcgaactctattaaccactggtgccggcatttggcattctcatccataaacacaggtgccgcggtgtattcactaacttgtgctccggtttcggcacaagcctttgccaatcctttttcagcgttatcgacaatcagttcttcgccaaatgcgttgatgaaatgctttgttcttcctgtgatgacaaacttatagggattcttgctggtaaacttcactgtatccccaatcatgtatctccataagccgcaagaagtagaaataaccattgcatagttcttgttgagctcgacttcttcaaggcaataagctcgtggactctcttttcctacttcctccagcggaacaaattcgtagaagattccgtagtcgatcattaataacatggcaggatcggagaggtcgttttgagttccaaaatatccttccgaagcattataagtctctacataatgcatcttcggtgtttgaatcacctgcttgtattgctcacgataaggagtgaaagcgactccaccgtggaagaaaacttccaggttgggccatacttcttccaaagcctgttttcctgtcttttcaagaacacgtttgataagtaccagcatccacgacggtacgccggacaagcttgtcacatttaccggaatagtgctgttggcgattgcttctattttggtctcccattcgctcatcaatgcaattttcttgctgggtacacgaatgaaattgataagcggattcacattctgaatcagaatagcggataaatctcctactaaactatggttggagttgaggttcggactatggctacccccgagaatcagtcccttgccggagaaaaaatggctatccggattgatgcggaaataaagagctgccgcatcttttcctcctctgtaatgaatgtcttccagtgcctctttgctgacgggaaggaatttacttttatcattagtcgttccggaggattttgcaaaccagcgtatctccgatggccaaagcagattctgttccccggctcgcaaacgttctacataaggtttgatttcttcgtatgtttggataggaacacgttttcggaaatcttcatagttacggatagaggagtaatcgtactttcttccccattcagtctgagcggcctggtgtattaagcgacttaacacacgatgctgtatctcactagcctgactagcatataggtctatctgttttaaacgggaatcgaaagtcttactaataatttttgtaatattcatttctgctttaacataataatgtttagtcgtgcaaaagtaacttatttatcttttttttctatctttacgacggaaataatcgttaaaaattgacgactttcatagaatacccgagttttagactaaaaaatgcgacaatgagaattggaatcttaacatccggcggggactgtcccggtatcaatgccaccattcgtggcgtgtgcaaaactgccatcaattattatgggatggaagtgataggcattcacagcggttttcagggcttgctgaccaaagatgtcgaatctattacagacaagtcgctttccggtctgctgaatttgggtggaacgatgctaggaacctctcgcgagaagcctttcaaaaaaggaggcgttgtctcggatgttgacaaaccgtctttaattcttcagaatattcatgaaattggactggattgtgtcgtttgtatcggtggaaatggaacgcagaagactgcagccaagtttgctgcaatgggagttaacatcgtatctgttcctaaaaccattgataatgatatttggggcacggacatctcttttggcttcgactcggcggtaagtattgctactgatgccatcgaccgtctacattccaccgcaagctctcacaaaagagtgatggtgattgaagtgatggggcataaagccggttggattgctttgtattccggtatggcaggaggaggggatgtgattcttgtccccgaaatcgcttatgacattaagaatatcggcaatacgattttggaaagattaaagaaaggcaaaccctattctattgtagtggtagcggaaggtattcagaccgatgggcgtaaacgtgctgctgaatatatcgcgcaggaaattgaatatgaaaccggtatagaaacccgcgaaacagttttggggtatatccagcgtggtggttcgcctactcctttcgaccgcaatctttctacccgcatgggcgggcatgcaacggaattgatagccaatggccaattcgggcgtatggtgaccttaaaaggagacgatatagcatctattcctcttgaagaagttgcaggaaaactgaaattagttactgaagatcacgatttggtgattcagggtcgtcgcatggggatttgctttggttagttgccggagcttctgtgccctgcactgtggaaatctcatcgacgaggatgttttcttctgaaacattttccggttctatctcgggatttgcattcagttcggtttcgagttcattctcaagcccggttgccaattcaatctcagaatcagttgcaaattcaacttccatttctgtttccatttcagttgcagttgccgaatgttgtattttaatctcttcgatggttgacataaatgtcggttcctttaccttctttatagccatctgggcggcattctgttgagactccttcttggaataccccgtacctgttcctgccggaagtccttcaatgcgtacttcagtttggaatacagggttgctgtcatggtcgagaaactgctcgattaattcaaaggaaacctccattttgttcttttggctccattcgataagtttggatttgaagttaacctcttttcgggatattttatctagatcgatataacggttgataatccgttgttccataaactgtttgcaacgttcatatccctgatccagataaatagctccgataaacgcttcaaaagcatttccgtacatgtagctgttgtgagaagaagagcgggtagaatacttgatgagcttatccaggccgatttcaacggccaacttgttcaacgtctcccgttgtacaatcttggaacgtgtattggtcaggaaaccttcccgtttcccttcgaaacgtttgtagacaatatctcccacgatggcgtcgaggatggcgtcacctaaaaactccagccgttcattgttgagaggacgtcccttgtcggagcggacagaagtcgatttgtgcaggagagcctgctcataaagctggatattgcgcgggtagaacccgagtatccggtaaaaacaaagataagactctctatccttgcggaacaggagccttatcttatctatttcgttacgtaacacgatattactctgcgtatttcttgaagataacgcacgcattgtgaccaccaaatccaaatgtattggacaaggcaacattaacttcgcgtttctgtgctttattgaacgtgaaattaaggttgtagtcgatgttctcgtcgtcgtcaccttcttcgtggttgatagtcggaggaacaatgccgttcttaatggcaaggatgcttgcaatagattctaccgcaccggcagctcccagcaagtgacctgtcattgatttggttgaactgatgttcaactcgaacgcatgatcaccgaatacttccttgattgcttttgcttctgaaatatcaccaaccggagtagatgtaccgtgtacattgatatagtctacttctttcggatccatttccgcatcttccagtgcattcatcatcaccagtttcgctcccagaccttccggatgagaagcagtcaagtgatgtgcatctgcagacatacctacaccggcaacttctgcatagatttttgcaccacgagctttagcgtgttccagttcttccaggatcaagcaaccgccaccttcgcccataacgaaaccatcgcggcttgcgctaaacggacgtgaagctttagaagcttcgtcgttgcgtgttgacaaggcgtgcatagcgttgaaaccgcctacacctgccgggaagattgctgcttcggaaccaccggatacaattacatttgctttacccaaacgaatcaggttgaaggcatctgcaatagcgttggttgaagtagcacatgctgaacaagtcgcgtagttaggaccatggaaaccatacatgatagaaatctgtccggctgcaatatccgaaatcatctttggaatgaagaacggattaaacttcggacccatttcctgacgagtgtagtagttgcctacctcttcttcaaatgtatgtataccaccaataccggcgccgaaaataacaccgattttgttcaagtcttctttctcgacgtcaagaccggaatcactcaccgcttctttagcaacagcgatggcatattgagtatacaggtccatctttcttgcttctttgcggtctatgtatttcgttgcatcgaagtctttcacttcgcatgcgaattgggtcttgaataacgacgcatcaaaatgagtaataggccctgctccactaaccccgttcacaatgttttcccaaaattcgggaacgctgttgccaacgggagtaatggcgccaaggcctgttactaccactctttttaattccatattgatgaaatcgaattacttagcgtgttcttcgatataagatacagcatcacctacagtaccaatcttttctgcttggtcatcaggaatagagataccgaattctttttcgaattccatgataagttctacagtgtcaagagaatctgctcccaggtcgttagtgaagcttgcttcgttagtaacttctgattcttctacgcctaatttatcaacgataatcgcttttactcttgatgcaatttcagacataactttaagtttttaattaataattagttttatttctttaaatttgcggtgcaaaggaatgaatatttatcgttttgcgcaaatatttgactaaataaatgcaatgttttgcacatttttcactgttttgtgcatcgaatttgagagttatgaagaaaaacatcgcaattttcgcttccggttccggttcaaatgccgagaatattatccggtatttccaaaaaaacgattccgttcaggtttcgttggtgctttctaataaaagtgacgcctatgttttggaacgtgcgcatcgcttgggagtgccttctaacgtgtttccaaaggaggattggatagccggagatgaaattttggctattttgcaggagtaccgcattgattttgtcgtgttggccggcttcttagttcgcgtgccggatttgcttttgcatgcttatcccgataaaattataaatatacatcctgctcttctgccgaagtacggaggcaaaggaatgtatggtgaccgggtacatgaagcggtagtggctgccggtgagaaagaaagcggcattactatacattatataaatgagcattacgacgaaggaaatacgatttttcaagctacttgccctgttctttcgactgattctccggatgatgtagctaagaaggtgcatgctttggaatatgaacacttccctcaaatcatagaacaagtactaaataataagaattaagtatcaggtattaagtattacgtcgtacagataatcctttgacagaattttattaaatttttcggtcaatgcgattaatgtttgatacttacttgaaacttaatacctaatacttaataatgtatgctttctcttctctccgcaaaggataatctccgcgtagggtttcgaatagctccggttgattttttagccggttgctgtcttcggttggattatacatttggaggactgcttcttcgtggttttttgcatgaataatgggggagacaggtgcgggtgcgttaatttcataatccccttttatttggaaaaatttgcagatggcatccaatgacatacgtgtggcgtttgcttttccatctgcagagtaacctgcaatgtgaggagttccgataaatgtcttttccaatagatcacggttgatttccggttcatgctcccatacgtcgatgatggcatccgaaatcatctggctgttcaaggcttttaaaagagcatcagtctggatgacttctcctcgtgaggtattgatgataacaggcttccgtttgagtgactgaaagaaaacttcatccgccaagtggaacgttttatactttccttccttatataaaggtacgtgaaaagtgatgatgtcacactcttccgctattttctccagtgaagagaatcgttctgcaccttctttttcttcccgtggcaaatcattcaataaaacacgcatgccaaaatcctgggcaactttagctaccttactcccgacatttcctactcctatgattccaatcgtcagttcattcagtcttttattcctgacggacttccatacaagaagcgatgactgtatatattgggcgacagaagccgaattacatcccggtgcattcgtccattcgataccggcctgtttgcaatactccgtatcaatatggtcgaaacctatggttgccgtcgctatgaatttcactcgactaccttccaataaatcccggttgcaatgtgtgcgggtacggacaataagtgcgtccgcatcccgtacgagctccggagtgaaatctttccccggtgcataaactacctcatcggctattctctgcaccgcttcttttatataaggtattttattgtcgataataattttcatatacaattcatcttttatacccacaaaggtaacaaataaaaaagtaagaaacggttgcttgtctgaaaaatattacatagatttgccctattatatatctattagctagttaagattatgacatttagtaacctttgcaacgagattttttggaaatcgacaacagattaccatgtaacggatagtgtggatgctccgatgaacaatccttacgagttgaaaactattgagtattatttatatctaaagaactggattgatgctgtgcaatggcattttgaggatattatccgtgacccgcagattgatccggtagaagcattggccttgaaaagaagaattgataaatcaaatcaggaccgtacagacctggtggaattaattgatagctactttttagacaaatacaaagaggtaaaacctctctctgacgcaacgatcaatacggaaagccctgcatgggcaattgaccgcttgtcaattcttgcattgaaaatttaccacatgcagcaggaggtggaacgtacggacactaccgaggaacaccgtgctcaatgccagactaagttgaatatcctgctggaacaacgcaaagacctttctacagctattgaacagctgttggctgatatcgaagccggaagaaaatatatgaaagtatataaacagatgaagatgtataatgacccggcattaaatccggtgctttatgcgaaaaaataacgaatggcgcgtattctcattattcgtttttcagctcttggcgatgtagccatgacaatcccggtaatacattcgctggctgtgcaatacccgcagcatgaaataacagtgttaagtcgtgctgtatggcagccactctttcaggggttgcctgccaatgtgggttttgtcggagctgatttaacaggcaagcacaaggggctttggggcttgaatagcctttattcggaattgaaagcaatgcattttgattacattgctgattttcatcatgtacttcgttctaagtatttatgtttgcgattccgtcttgccaataaaccggtagcttccatttgtaaaggaagggcaggcaaaaagaagctggttcgccgtcatgataaggtgatggaaaatcagaagagttcttttcgtcgttatgccgatgtacttgagaagctaggtttaccggtactattaaatttctcttctatttatggcgaaggaaaaggaaactttgcggaaatagaaccagtcacagggcctaaagaagatcaaaagtggattggtatagctccttttgccaaacatgcaggtaagatttatccgttagaactgcaggagcaagttatagcacattttgctgccaatcccaaagtaaaggttttcctctttggaggcggtaaaagcgagcaggacgtatttgatgcatggattgctaaatatccttctgtcgtttcaatgatcggtaaactgaatatgcgtaccgaactgaatctgatgagccatctggacgtgatgctttcaatggattctgccaatatgcatttggcatccctggtcaatattccggttgtctctatttggggagccacccatccttatgccggttttatgggctggaaacaattgccggtcaataccgtgcaactcgatttgtcatgccgtccctgttctgtatatggtcagaagccttgctggcgaggtgattatgcctgtttgagggatataaagccggagcaggtcattgcgaaaatagaagggcttgtagattaatccttgctgaagttcaaattagctgtttattgagccgaaagagcgtagaatcaaataatgatgaaagagatacaacgaaagaaaaaggtactgatagatcttacgaattatggtagtctcacagccggcttcgggcagattgcggccaactatgcaaccgccttttcgtctatgccggtagatgatcttcattttgtatatttattgcggcagaaatatatgcaggaatttggtccgaatgtgacctctgttccggtacgtcgtatcaataagttttttccttttacccttcccaaggtagatgtatggcatgcggtgaatcaacagcgcaagatgttgcgtattgccggtggtacaaagtttatctttactatacacgactttaatttcttaacagagaaaaagccctggaaggcgaaaatgtatcttcgccggatgcagaataaggtcaataaagcagcggtcgtgactacgatctctcattatgtggcagatgtcattcggcagcatgtagatttgaaagggaaggagatccgggtcatctataatggagtggagagaatcgatacattggaaggaataaagccgtcgtttgctacagggcgtcctttcttttttacgattggacaaatccgtagaaaaaagaacttccatctcttggttgacgtaatgcgttatttcccggaatatgatctatatatttgtggcgatgctcattttgcttatgctgaagaagtgcgcaatctgatccgtgagaatcagctcactaatgtctttttgacggatgttatttctcaaagcgagaagatctggttatatcggaactgtgaggcattcctgtttcctagtgagggagaaggctttggattgccggtggtggaagctatgcaatttgggaaggctgtatttgctgctaatcgcactagtttgccggaagtttgtaatggacacgctatcatgtgggaacatttggatacagaatctatggtggaaagtatccgggagcatctacctgatttttataaagataaggaacgcttggagaaaatcaaggaacatgccgcttcattcaattacgagaagcatatacaagcctaccttgatttatatcgggagttagctcaattgccttagtattggaatcaattgctcgtataccttttcgggagtaattaatgcaaaacgctcctcatagggtaatgtcgcctgttgttccggtggaagaatgtcgtcaggactaattccttcggcgagtacggaattggcgggtaaccacattgactttgacgcacttggtgaataaatggcaaatgaaggaactccaagagcttgggcgatgtgtctggctcctccttcgttcccgaagtaaaatgaacagttggcacaaagtgctgccagttgtcgtaatgaagaagcttgtatatcgatcttgatacgttccggacatcctaattccttgtagatatttctggcatcttcttcttcgtaccccggcgcgtagttgaagatcatttgtatgtccttgtatttctctaatattcttttcagtgtggctaccatgaactccgtattccattttttatggatgagtttggttgtgactcctattaataacacagggcgtgcaaaatcaatcccttccttttccatataatatcggaaatcttctttttcccggtcagtcagatataacttgaattcttttgtgtattgaataggtctgatcttttctaatggtgctgcaagcaatagattgcgttgtaccatgtcagttgtcagattcttactgtaagtgtctgtccggtagttcagtagaaaatgtgtatatcctttaatgcgtcctatccggaaaggagttcttaatgaaaaaagagagaaaaaaagggtccgaatagtagagcgcatatcgatgattacatcgtatctgtttttatgcattacctgccatactttttttatataagcagtgaatggtttattctcattcttgtcaaatgtaatgactttatctatatccggatgcccctcatagagtggagcaatatttttattaagcacgaagtgtatctctgcatcgggaaaactttttttcagcgtgctgcacaatgcaacagccagaattgagtcgcctatttgtctaaatcgaataattagaattcttttgattggtttcatgcttaaacttccttatgctttttatcgtgcaaacataactaaaaaaaagcatttatgtctaaatataaatgaaaagaaaaaagaaaaaatgactaaagcggttcgtaacaggacttatatgtagagagagttagccaatctttgtgagaaaagagaaaaatatagtcggaatatggcctaatttctttatctttgctcaatctttgtaattagtattatataggagagtgtaatgagagtgattgtaaatcccaagtacgcacatttgcagaaggagatagaagaaattccaaggtccttccagaaagaaagagatgtggtgtatgatggtcgtaatgttttaaaacgaattggcttgggcagtattgatgttgtggtgaagagctttaagaagcctcacatcatcaaccgcgttgtatattcgtttttccggcaatcaaaagcagaacgttcctatatttattctatggagatccaacagcatggttttgacactccggagccagtggctatgattgaacaatttcagaatggtcttctttcacatagctattatatttgttgttatgatggtggcgaaactgtccgttccctgatggatgggaaagtagagggaaatgaagataaactttctgcttttgcgcgctacactgctgctttgcatcaggcaggtattctccatttggactattctcccggtaatatactgattcatcagaatgaaacgaatgaatacagtttctctctggtcgacgtgaatcgcatgcagttgctatcggatattgattgtgatatggtatgccgtaatatgtgccgtttgtgtatttcgcgtgaggtactgacttacatcatgacagaatatgcttctttgcgtggatgggacgtcgaatctacggtcagtctggcccttcgttacagcgatcagttttttactcattatatttatcgtcgtgcggcacggaaagagaaagaaaagcatattgtatccctgattttattcttccgtttataccgttccgtacgtaaattcttttcttgggaaccgcatatctcacgtttcttattgaaaaaggaaaagcatatctatgatacatacctgtgcaagtatgattattgtgaattgctttctgctgattatcaatgattacttcttacttccgcgcatcactacactgcggattttatgcctgaaaaaccctttttgattaatatatgtgcagttatgtttgtccagaaatgcagagataacttcttcgtcatcacgcaagtggtatgtgcaaatggcaaaatccagcttctggcaattctggaataagttattgcatccggccaatgcgtgccgttcggctccttctatatccattttaagaaatagatgttcattcgtctggttgttgaagaaatcatccagtgtttgctctctcgaagaattatggtcactcacatacttctggacaatcgtcactttatcctgccatggttcgaaggtagctctgatggcttccaaccattgctcgtcctgctcaaacaaataaacatgtttggcttcttcgataatttccagtgatgaatatccttcggcacaaccgacatccacaaatactttccctgtcacttctttaacgctgttgaagtaatggtgcggtgagcgcctgtcttgttccatactcaaagccctataatatttttgaattttcttggctggagtgctttttctgaaatagagtcgcttcttttctttttgaacatagtataagcctttttcctcatctttctgtacatcaacaggcatattggcgtattcatccttgaattcatacaggtgtcttgaatatccatgttctttaatatattcatagtatttcagataaggagagccaggcttatatcctttcatgaaataatatgggagagtgccatatataaatttctttattgtatgtttaagtacgttcatttcattagtttcttgtagatgtttaagatttctaccgcttgcttttcttcagagaatcttttggcaaatttttgccccttttcaatcatctccttttttctttcagtatcggagtatatctgtttgaaagcatcggccattcctttgatatcgtcaggatgtacatagatagagtcgggacctccggcttcttccaggcaagatccagtcgcggccactaccggaataccggagtatagagcttctataatgggaataccaaaaccttcgaaacgggaagggtatacaaaaatttctgctaactgataaaaaaccggcagatcatcaaaaggaacattgctgatgatatgtacccttttttccagcttattctccttaatgaaacgttcaatcttatcagtatattccgtgtggcgtcctacaatgacgagatgaatctgttcaggaagcatcattagtgcctgcaccgctgaaagggcgtttttgcgttcttcaatacttcctacgttaaggatatagtgatccggtagctgatatttagcccggatttctcttttcttctctgctgctacaggatgtatgaatgaaggatcacatccctgataaacaacttctatcttatcggcgggaatcctgaaatactcaataatatcacgcttggtacattcgctgatagcaatgattttatcggcattttcgcaagctttacggaatttgtatgtgtatattttcctgtcgatcgaatggtaatactgcggatagcgcagaaagatcagatcgtgaatcgttacaatactttttacctcgctttgatgtatattcaggggcaactcattactaagtccgtggaatatatcgattttttctttttccagttgttgggtaacgccccatactcgccacaatgaacttaactttttccaggaagaagtagtgggataagaaagctgtagttgctgatactgcttcgttaatttgtccagcctcttgttttcccgtttcttgggggcatacagcacatattcattctccggatagaattggcatagaatatccactatatagcggctataattacccagaccggtgaaattctgtactgcacgttttccgtcaaaacctattctcatttcttcttcttacctttatgtgattataattagacttcaaaattccgataaggtttattcaagtctaaataatggaaattatgttgtctttgtccactttgtttaggtatggtcatgtaatctccatatttctgtgacagataagcgtcgtatttctgtactccccatacttcttcatcttcaaaccggataggagtgggagtgcccaggatatccttcgacatgattcctttcattccatcatcataatcgcagactaatgcgcattggtcgaaatcgtatttcttcatcaccttcctgatgctttcctgtgctccggtaagggtaaaaaactttctgcataatagcggtatccatgaactgggacctttcccatgtttgtatggatcgcgatgaataagataaagtactcgtttgtagaactcatacttcgcaaaatgcattctttgcgccatacggctttccggaactccatctagtggaaatatatcaatatatacacctcccagatatttgagatgcatacgctcgattaaggttgtgttggcatcctgcacctttgcgaacggaagaggatattccttatcattctcagcgcataccgcttcgtaaggttccggtaaccattctttggcattagccattagtaagtcataatcagctcttggcattccgatatccaaatcatcatcccaggggatgaatcctttgtggcgcacagctcccagcatggtgcctgccatgatgtaatatcgcagattatgttctttgcaaactttgtcaacagctaataagttctttaatatgcgaagctgtagagggcggatgtcgtaattagccattctatctgattttaattaataaagactggctggaatcagcttctgtgcctgttgaaagtcttctactgtgtccagctcggccgagaagaactcggtggtgtccataacgtaaaaactatatccttgcggaatcagtctctcaaaagcccgttcgtagaatatattatccagtccttcggcagtaatcataatttccagttcccggaatagcgctttggtatattcagctgacatcttttcaatgccgatagattctccgatagcataggatatcgagcagactttgctgatttcaacgaccttttgtgcatcgtccacgatgacttttatttcttctgctccgagctcatgacgattcagtgccaatatgtcgtccttatccgaatgaagcagtttctctacaatctgcggatcaaatacaatgtcgctgtctaataacaaaatctcctgcccatccgtataggaacgggtgagccataatgaatagatattgttggttgattcatacctgtcattatagatgaaagtaatatcttgggttggataatgtgcctgtaggaaatcaacgatttgctgctggcgatacccggtgacaatgatgaactcatcaaatccgttttgtatcagagcatcaaaagctctttccaaaaggcatcgttctcctattttgagaagacatttgggcgtcgtatcggtcagcgggcgtaagcgtgaagctattcctgcggctaatattactgctttcatttggatgctatttctttgattgtatctataacgatccggttctgctctgggcgtcccaatgtgatacgcaaatgagtattgatatccggttcattcataaacttcactttataactctgttcagcaaaagccttttgtaaagcctctttcagttctatcgggtatttgattaaaataaaattggcaaccgattcatatactttgaatccgggtaacacgccgatttccttttcgtaacgctcacggtcttcgttcatcagtttggcgatgtttcgatagtgtgcgtccgatttaagagccgcaatggcgatatcttcggatatccggttatatcccagatatttattgctgtatctgctgaatttttccagctccttactcatgaatccgaatcccatacgtaaaccgggcaatccataaaacttggataaagtacgggaaataatcaaattcggatatttattaaccagctttttgatataactggtatcagttgaaacaaaagaagcgtatgcttcatctatcagtaccactgttgggctgggcacttctgcgagcagttcatccaattcttttggagttaaaccattgccggtagggttattgggagaagctagtaaaagaatcttcggattctctttctgaatcatatcttttagcgtctcaaagtcatatttaaaagtatttccgtcttcgtagagaggatattgcaaagtatggccattcacctcatctgcaattgatttataataccaccatgagaacttgggaatcaacatcgttttatttccatcttcttgagtcaggaagtagtgtacagcttgcttcagaatatcttctccgccgtatcctaataagacttgtgtttcatctatatcgtaaagttcggataagaaaacagataatatacttttctttccttcatcataaatgcgggtataaaaacaaagtttatttatatcgaagttttttaaagcctctactacttcttttgatggactgtagttaaattcgtttcgatctaaaaagttcaaattcttttccatattagttttgtatgattcctttatcgcaccaggttagcttcctgactttcgtttcgttcaaaatactgcggttgttgctcaaattatccgttccatgtagctcatgataaagatggaacacaattcccgcaaatttgatggtacgcttgcgtacaccgttattgatgaggcggcacactaattcatgatcttcgcttccccatccggtaatagcttcattgtacccattgacttttaataaatcctctttccagaaagccatattgcatcctctggaatatgaaatatcccattggcgataatgctgaagtagtgggcttagccaaggcaaatgtactccgttgattgtgtttttagtacctttgtcgtgaatagagataatgcagttcctttctgccagcatctttttggttaaaccttcccggattaatacacggctaccggttacgaaactgccttttttagcaaaatgtacatgatctttgacgaaatctttgtgtaagacgatatccccgtcaatttgtataatatattctttagatgctttcgcaatagctttgttacggatggaagccagtctgaagcctagatcctcatgccaaacatgaataatggggacttcggaagaagcagccaattgatgaattagctctcctgtatcttctttagaaccatcatcggcaatgataatttcatcaggaaggagagattgacgtagcacgcttttaacgcataattctaatgcgtcgcttctattataggtggatataattagcgatgtacttatgttgctcgccatgggtttattcatataattattactaagttagttaaatagttaagggggcttgcactaaaattctacaaatgtatacattttatttggttgtaacaagcgttaaaggctttttcaggatagctacatcaaattttatgattcttttttttgttctggaattaataagtctacatgcaagttcgttgtctttgcggctctagtaagtcatctcttcattataactattggctttgtataaatcttctttccaaaagactatattcatcctcttacatacaaaatatcattatgatgatacttctcttgtaaatgactaagaatgaagagatgcttttccatgtttttaagaagtataagactgtaaattttgtaaatgaaaataatattttctatgaaccttcttatagtatattatttgttgatagtttttccgcctaagttttgtcctttttgtatttatgacttttaattagatactggatgctaaaaggaagttttaggaataaaaaacgttttatagatttgaatgttagtcgggtttccaaaataggagggatacagttttgagagagccttgctaatccttttattaaatcaacccttttaatatttgagtacatcgctggtaggtatcgatgataaatttcaaataaataatataagtttatttctttttgaagatgtttgctaaggttgttgtctgcttgcatcaatctcctgatctcactaaaaactatggtaagatcatttagatgcttcaaggtgtagccttgttctatatttgtaatagagtcttctctcttgcaattataaagataagttgtccggttggttaggctaaatgatctggtatttagagcgagcatggcatgcattactatgtcttcgtggtacacgtgttccaaaaaatgaatatgaaattcttttaaaaaagaaagattatataatttattccatgtagttacccatatctcatttttttcttcataaaagtattgagccatacataatttaccttttcgtgtaatattaggatagttagtaattttgagtgaattttcattctcatcaatttgattgattccggctgctacaaagtctactttctcgtgtgaaataatattatataaagtttcaatgcaatcaggaacaatagcatcgtcgctatccataaagtatagatatttcccttgagcagattcaattgctgtgtttcttgttcctcccaaaccaagattttttttatgtgtaattatacggatgcagttacctctaggatgtgtgcttttaagttggtagactatatccatgctgttatcatgccctaaatcgtctactatcaaaatctctaagttttgataggtttggtttaatgcagataataaggcacgttcaatgtacttttctacattataaataggcattgagagagttattaagcacatacttttcttcaatcattaataacaaaataatattaggtgattacaaagttactttaatatttgtaatgatgaaagttatttcgttttttattgatttcttatcccgagcttgccctatatatagaaagaataatttcattagaataaaactttggattattttcattacctttgttcagaatattgtgtttgtctaaataatgggactgatgtaaattctgcaattcctctattgtttaagactattgttcttttatttaaattttaataatatgatatatattatttgttatgattggccttcaacatctggtaatcatacaggaatgaggtatctttatgaatatattcaaaaaagaaatcctgaattgtataaaatgtatactttcaatatgggtaggcgttttttggataagggaaaaaaggggaagaaaatctctgtgctttttacggcacttaaattagcaatgacatataaatcaggagataagtttgttcttactgaatatttacatagagattcatatcaaatattgtttgcaaaaataatacgctttatatgtcctaaagcacctatatatgctatggtgcatcttgttcctgaaaaattggaaaggcgatattcgaaagcacaaataaagaagagttcgcgatttgttacagaaattgtaacattgggaagtagtttgacatgctatctcaatgatttaggaatagagaatgtttatacttcctttcattatgtcgataataattattatactccttctgcaaatctttataacagaggtggtgatgtcaaggtaatagtaatgggtgctttggcacgtgactttgaacagattgcttatattgtttcaagacttccgcaaattcatttttatatatgcaaagggcgggagaatattgattatttgttttcaggtttaaagaatgcaacattggtggggtatgttccggaggcggaattaaagcattatatgaatgattctgatatttcattaaatgtgatgaaggatactattggaagtaatgtaatttgtacttcaatggcaacaggattggcgatggtggttagtgatgttggatctatacgggactattgcgatgagactaatgcatgtttctgttcttctcccgatgattttataaagaatattatgatcttagcaaatgatcgagagttgctcaattcgttaaaaaaaatgtctttgaaaaaagcacagcagttttctatcgataattattgtgttagcttgtcatctctattgaagtaattgaagagtatggccgtttacagttattatagtaaaattcttaaaggatattgttagcaagggtattccttaaattcaaaaatataaggcaatttatttattgcgagttaattgcctttttattttcttcccaacatgatgaactaaaactagcaaagatacatttagtgtgagttttcttagagcgttgcataaaagtaaaaggtcgtgtaagctaaagtcgttttttagcgaatgctgtaggaatttatatatataacgtttgattgcttttttgaattttctttcgtgaagatgggaatggtagtttatactaatccattccatgaaaagtattgttgctctaatcttttctttattgaaatgagtggagtttgatatattctctccttcagcatttctccagctgacaggattgcctggtaaagatatgattcctcctgtaaattctgcaaatttagcccatgttgcatcatcggtgcaccaagccaaagggaatttaataaatcctcccgtttgctcccatactgttcggctaaatacatactcacaggcggcagaactaattttcccagataatttatctaataggaattcatatccagaagttaaatcggttttaaaaggagggtttttatactttagtttaccatactcgtcaacgacttctaaaggaaaacggaatatatattttccttcagaatgtttttgtgaggctcgaattatacgtgctactccgtcaaagggcattaagtcgtcatctgaaaaaagccatataagttcttctgctgacaataatatacatcgttcccaatgaccgggtaggtcttttttgcccatgttttgttcaaaacgatgatatataatgtcaaacttgttcttgtaacgatctactatggtctctaatgggtagggacttgcatcatcaccaatatatacggtaaattcgtgattgttttgtttagcgatagaatcaagtgtttcttgcaaaaaacgtggtttataagctggtataataattgctaattttttcatttttattgctatcaattaggttttgcaaatatacacattcagtttgtttaaatattgtatttgcaaacttttgtgatggaaaactatactagcaagttgctgaatgcaaaataccccatagaattttttcttttggcttttcagttatatatacgtattgttaataatgattaattgcaagcgtgaaattctgctctatttgtaaacaatctctttttagatacttcctatggatattattccttatttttgcaagtagaacatgaatattcaaatatggaatctcaatactcggtaagcgttatcatccctgttcataatacagctccgtatttgcgacgttgtatagagtctgtacgtaatcagacgttgaaagatatagaaatcatattagtggataatttgtcgaccgatgattccccttctatttgtgatgaatatgctaatattgattctagagtaaaagtgttgcatcttgatgaggcaggtttatctatagctcgtaatgcaggaattgaaatagcgactgctccatatattgggtttatagatagcgatgattatattgaaccgacaatgtatgaaaacatgttgtcagtcatggtacagaacaaagtttatatggtatattgcaacttttgctttgagtatgaagatggccgtatagaacaaatgtatcctaatacagctaatgtgtatgtacgtactagtcaagatgttcagcgagatattatttttgagagagtaagtagttcagcttgtactaaactttttgataagattttttttgattcttatcgctttcctgtaggtatgttttttgaggatcatgcgactatttatcgctggataagtatttgcgataaaatagtttggattgatgctgcttattatcattatatacagagaggtgatagtatttgccatacaatcaatcctataaaacgttatcattatttcttggctgaatattcaagattggagtttgcaaaggagcggcggttgtttgaaggtagagattggtttgatgccgtcaatgtgattgtggaaaattgctttaatcattttcaagggtttatgacggatcctaatcatcagtcgtatcctgttgaaattaaagatatgaggaacaagttgagtagatggcgttttttgtcaagaaaagaattgtcttctaaatattataaacgattacgtaagataacttatttttggccaatttattattggactcactttgccaagaaaaagaattaaaaaatgatataatggaaaaagaataccctttagtttcggttattattcctgtttataatgcgcacaattcgataactaaaacgttgcagagtgttattaatcaaacgtatactaatcttgaaattgttgtagtgaatgatggaagtacagatgatagtttagatataataaagacgtatgcggctgaagatccccggattgttgtatttaataaacaaaacgaaggattagtgcaggcgcgtaaatcgggtatagatattgctactggcaaatatatccaatatttagatagtgatgatattatgcatgaggatgcaataactaggctggttgctaaagcagaggaaacgcaagcggatatggtagtggccccttttatgttttgctatgatggagagtttcataaatcaactttttttgattttgtagagttgtcaggcgtggagtttttgaaaaatattcttttaaaaaaggcttattggtgtgtatggtcaaaatttcatcttcgatcattatatcagaatgaaatagaaaggccagatatatcatttggtgaagatgtcgttctttccacacaattattgttatacttacaaaaagtcgtttcagttgattatataattattgactataattttaccaatacgtcaatgtcacatccagcaacttttgatgataaaaagtatggagactttgtgaattatacaatatggattgaaaattatattgataaaaaagggttgagggaagagatgaaggaagcacttgctcatttccatcttgaaaatgcctttagaagaatttattggaaacgttttgctgatattaggaaggaaatgaaacggcttgttaatgaaatggaatcctatccttgtttaataaacaacttgtcaaaaagagaacgtaagattgtgaatgcttatagagtatcaggtttctggggagatttgaaacttagatattataatatgcgccataaactgtaatgtgctcagataaattaaggcgttgagaaatgaagcatatattgtttatcgcttataatctagctggttggaggatttgaatctgttgcagtatagttggtaaaataagatataaagaaatgagtattattagaaggtggcaaagaagttgttataaaagaatgttgaaggctcgcttagttactcctaaggttgtagtgttgatggatggtggtatttgttctcaaatgctccaatatttgttgggagaattttttagaaagcgtggatgtaaggttgtgtatgatctatccttttataaggaatggggaagtgacatggattataaatttgcccgcaattttgatttgttgaaagtgtttccttatttggggctgacaattgcaacagagttcgaaatctcctattataagagacatttttattatgttgggaataatacatcggaatggatagatgatttttcatttttggaaaaaaatccccctatttatttaggtggatattatcatttgccgataaatatttgggtacccgcatttatgtctacttatagaatctcatctgaaatatttgatgagggtagcaaaatgttaatgtcagaaataaaacagaatatcaatcctgtagcagtgcatgttcgacggggtgatttaagtgttgaagttcgagcgtatgggaagcctgcttctttgagctattttaaaagggctgttgattatatggaaaaagagactgttatgccttttttttactttttctcagatgagccggaatgggtggcatcagaacttattccctatcttgaatttgcaaatgagaattacaaggtggtggatataaatggttcagataaggggtatatggatttgtttttgatagcttattgcaaacatcagataacaagtaaaggtactttgggaaagtatggtgctttattgagagatagtgcagataaaatagtgattctttgtgatgataaagttgaatatcagtggaaaggagttttccataattctgtatttttataatagagaaaaattggataactaatcagccgatttaaatttttggcagattagcttaatcctttcccataaagagttttttcttcgcaataattcatgcccgccatattggggtttatttttgtctcgaatgaggattattggttcaaaaggaaggagccaaccttctgggtatagatatgcaggggacaatgtaatagctggtggattatctaaaaagtatttattgattagagattcgtcgtgccaaattggtattatatggtttgtggcatctctgtcaacccatgagcaaattgttgtgcagagtttcaagtaggcctttgtacatccacctgaaagccctccagcgtaataatatcgaccttctccctctgggatataggcagtagaagcatctcttcgctcgtatgtaaattcggagttcggtttattgtagaatccagggtgcatagttcctagtaatccgttactatctgatggtggtagaatttctttgccaataggactggtgaataagagattggcattgaagaaaaatagatagtcggtttctcgctctaactgttccttgatacgaaggaatatatggaaacgttttaatgtgttgtcaggccatcctaaattcttttgtttgatccggtgaatatgtttgttgttttcttcgtcatatagtttaggactatcagtaaatacataatactcgataatgaaagattggtcttgcataaaataacgttctgcgcttagataaaagtctttccaaaaaatgtcatatttgccagtacagatatataatataccaattctcattttatttattgctttgattcatattattggcaaatatataaagatttattttatattatttgtttgaggtgtttttattttctgtgaattaccggtagcaggagctttttaaaagtaaattctatttatttctggtcatgagtgtcttgcaaatgggtagtaagcattcggtgaaccccgttttttctatagttcttactctgtatctttgcaagttttttccagtgcaaacatataatataccaattctcatgtttattgttttaattttagaccttcggttttgtccatttgagagtgttatttatattgattatactaaaaataaagcagtaagtagtagaattgctaatagtatagagatacttacgaatattgagtatagacgtttgtattttctgtattttggtttatagtctgttttttgtgcaagggctattaaaggttttttatataggtcaaggatgtattgtaaatgatagcataaccattggtcttgtttttgacctaggtaattaaaaaagagaataaaatagtatatataccctgcatagccttgactgttattgtcaaatatagtccgaaagaatgattctctggtgtcaaatcctgcttcttcgaggttgctgcatggtttcattccatgaaaatggataagcttagcattcccattaattccccagtacggtttccagttatattcaataggtaaaatttccatgtccttgaaacacagctcgtttaagtacccttgatcaaaaagtcctgaagtagatctttgcctttttttcatcatctctacaaattgctgatatttgattctcattccttggatgttcatgactaatattccagcattgaaataactcattctttttgtatcgcgttcaaattcgggagcagcagctaaataagcaggatgaggtagatctttcagtaatatatcatcattaaagattatgtccatatcggtgtataatacatattcgtcttctttttctattataggaatctccattctcatgaatgtgccgaatattcgactatattctatatcttttcctagttctgtttccatccattcgtgagaatatatttccattagttcctttttatatggtaattcatggatgatgatctcaactttaaaatcttttagtaagttgtaaacaggatcgccaattttaccatcatataggcaaattaatcgaagagatgtgtttttacgagcactaattaaggttacctttaacatgttaaagtaatcttttctggtgacaatagagtctgtcaaacaaatataacatttcataatttatagaatatataaaataaattatactaatatgtttctcaaagctatcataactgtaagttatacaatagtccttgccaaactgttagaattgtattgtatcttacaaaaataagcaaaaaaaacttttactaagacgttttgataaataattgtgatatgttaggattttctttcctgaagaattgaattcgaagagttaaggatggatgatctacattctatatttatctgttagctttggaagtctggagttttttatttttttaaatctaagtttgtccttacaggattttatccttagttttgtgaactatttttttatgaattagagatattcgtataaaagtatcttaatatataaaattgatttgaataaatatgatttctattataatatgcagtaggtttcaatccatctctaagaaattgaaggataatattgagaatacggttggggttgttcatgagattatatgtattgataacagtaaaagtcaatatgatatatttagtgcttataacgaaggggtcaaaaggagccaatatccacttctatgttttatgcatgaagatattttacattacactagtgattggggaaagcttctgataaatcatttcagagatttgaaagtagggcttattggaatttctggaccacgttttattagtcaaataccgggtatttggtggggacctggaagtacagatgcaggaaaggatgcaatttgccagtattctattgacactaatagagctgatccaaccattacttataatacttgctttaaacccattgcagatgcgaatgccatagaagtggtagcagtggatggatgttttttttgcatgaggaaatctgtttttgataaaataagatttgatgaaataaattacaaaggatttcatttttatgatcttgatatctcattgcaggtttatatgctgggactgaaatcattatgtgtatatgatattctaatagagcacattagtaattcaaagctagataatgaatggctgactaatgcacgaatatttttcacaaaatggaaaaactgtctgccgatagtaagttatccagtgtcagcaaaagaaagaagagttttagagaagaacaatcttcaaactatgaattatattattaatgagaataatcgaaagcctagtcattattataaattctcagagaagctatatttattgcgatactgctgtgataaaaaaatgcttcagtcactaatctattaggtaaaatgtgtcactttatgttgagtggagcacggcttttcatttaagaaatattgtttatcgcttgttattgtaataaaaatccttatattcgtgtgcagcgatgcggaagcatcgccttaggcatttcttcttatcgttcatttttaatttctttctactttgtgagttgtacgtccggtaactacatcagaggtctctgattttacaataggtggttatacctttgaagtaggtgggaagaataaatcgcagaagcaggtgcatgatgtggagaatgcgtatatcgtgaaagatgatattgagtacgggatgcggaatgtgattcctctttggacatttggttttttatattgagataatatgtatatttgtacgatgtgaacttaaacagattgaaatatgggtggcaagatttaccctattggtatacagaattttgagaaactccgtagaggtggctatttttatattgataaaacggcattgatttatcaattggtgaaaaccgggagttactatatcttaagtcggccgcgccgttttggcaaaagtctgcttatttctacgcttgaagcttactttcaaggaaagcaggaactctttgaagggctggctatggagaagctggaaaaagattgggtaaaatatcctatattacatcttgatcttaatacggaaaaatacgatactccggaaagtttggagaataaactgaatggggcgttggtggaatgggagaagatatatggcgaagagccctcggataaatctttagcgatgcgttttgaggggattattaggcgtgcctgtcagcaagaggggcaaagtgtggtgatcctagtggatgagtatgataagccgatgttacaggctattggtgatgatgttttgcaaaagagtttccgcaatacattgaaagccttctacggcgcattgaaaagtcaggatgggtgtatcaagtttgctttgttgacgggagttaccaagttcggtaaagtcagtgtgttcagtgatttgaataacctgaatgacatttcaatgtggaataagtatatagatatttgtggtgtgagcgaacaggagctatacgataatctggatgccgaacttcatgaatttgccaatgtgcagggagtgacgtatgaagagatatgtgccaggttgaaagaaatgtatgatggctatcatttcacgcacaattccaaaggaatgtacaatcctttcagtctgcttttagcttttgataggaatgagtttaaaagctactggtttgaaacaggtactcccacttatttggtggaattgctgaagaaacaccattacgaccttcatcggatggcccatgaagaaaccgatgaacaggtactgaacagtatggattctgaatctaccaatcctattccggtgatttatcagagcggatatctcaccattaagggatatgatgaagaatttggtatttaccgtttaggttttcctaatcgtgaagtggaggaaggatttatccgttttctgcttccttattatgcgaacgtcaataaagtggaatctccctttgaaatccaaaaatttgttcgtgaggtacgtgctggtgattacgaatcttttttccgccgtctgcaaagtttcttttcggatattccttatgaactagcatgcgaattggaattacattatcagaatgtactatatatcgtgtgtaaactggtaggcttctatgtaaaagcggaatatcatacgagtgagggccgtgtggatatggtattgcagaccgataaatttatctacatcatggaatttaaattgaatggtacggcggaagaagctttgcggcagatagaggataaacattatgctcgtccgtttgcaacggattcgcggaaacttttcaagattggcgttaactttagtgttgaaacaagaaatatagaaaagtggttggtggagaattgatgcgcctctgaaatggatataaaatattcatttctcatgttctcataaatatgacctaagtgtcagattgttaatggtgtaagctatgagaaatgattttaaatttagtgtttctcatagctttattcacaaatagaccttaatttggcttatttctcatacccgttgaaatcatttctcataatgccccggagttggtacataaataggctgtgtgggtttgcctatattctgtaagtttccttgtgcctttagacgacgaatctgtctgctggccatgctttgggtaaaacaacagagtgactgcatattactacgggtcaatacaggatgggttgcaaaataggcagtgagtttcttgtcgatctcttcttctgaaagagaagccgaatgtggcttgtatttcgaacgtcgtaagtgactactcatacacaaactctttaaattcctgtcagcctggaagttaatggattttagtttcactttatctgcacgggtggtaagtgagtgcacgggttcggtcgcttgcaatgtaatctggaaatagccgatcccatccagatgtactcgttctccttcgcataggtggttgcccatgcatctgctcaattccattagcatggcttctacttccgcttttccgaaagtggttgccatgtggatttctcttgccaatttttgagtagtcacatgttgaaagttgactacccgtggatgataactaggttcttctccttctttctccggttggggattcttataaaactcgaattgtattgccatctttgttctaatttaatggttgtttatatattatgtaattgatgcgcttagtgtatcttgcctttattcttttattatttaactaccagctagttcgttccactagagtgaacggttcttttcactctagtagacagatctttctactctagtgaacagaaccgttcactgtagtgaaacgattgagatcctctttcaaagatacgacattattaactgaaaaacaaataattacacggttgtttacatgtaaataatagatgagggctgtgtaaaataaggttggccaatgagcgaaatgaatggttggtatttgactatgagaaatgatccggaatactatgataaatagacaatttttcttcaaaaaatgaaagacaaagtatgagaaataccggatttaaaaacgtttctcatggtgtactatgctgattttgtgtgttttatctgaaacttatgagaatatgagaataagaattgcaaatcattactagtggacgtgcgtttgggaggtgtcaaatttgtttatacgggatattaaccgtacatttgtctgtggtaataatcgccctacaaacacatgcaggacaaataaattaattaagcaatgagaataacattggtaagagacgatggcaaggtgaacactatgcgtacgttaagaatcgaacagctcgtagagcaaatgaaagtggaaaccaaagcacagtctgtttcaaaaatgagagaagtcctgccttttatgcttccgggtgataaaaatgactatgtgcagaaagtgcagaaggtgatacctgcagcggcctttttccgcaaagacggaataacgaccatgagtgaatacaacggaattgtgatgattcaggtgaataacttatccgggaatatggaagcggatgaagtgaaagagcgggtgagggagctgccgcaaacttatttagctttcaccggttcttccggaaagtcagtgaagatatgggtccgttttacttatcccaatgaccttttaccggaaacccgtgaacaggcagagctttttcatgcacacgcctatcggttggctgtgaaattctatcagccccaacttccttttgatatcgaactgaaagaaccttcattggaacaatattgtcgctggacttttgatccggatttgtattttaatcccgaagcgatgcctatttatatgaaacaacctgtggctatgccgggcgaaaccacttatcgtgaacgggtgcaaacggaaacttcaccattgcaacggcttgcaccggggtatgaaagatgtgatgcgctttctgttctttttgaagcagccttcgcacgtgcactggatgaggaggatggttatcaaccggaagaaggtgataaacagtctttgttgataaatctggccgggtattgttttcgcgccggtattcctgaagaagatacggtgcgatggtgtcgggcgcattatcgtttgccaaaagatgatacattggttcgggggactgtacggaatgtatatcggacttcagagggatttgcgagtaagagcagcctgttgccggaacaattatttgtcatgcagatggatgagtttatgaaacggcgttatgatttccgtttcaaccaactaacgtcacaagtggaatgtcgcgaacggaatagctttaatttttattttcttccggtggataaacggttgatggcaagcattacaatgaatgcacaatatgaggggcttaaactttgggataaagatgtcgtgcgtttcctgaattcggatcatgtaccggtttatcaacctattgaagagtttctttatgaccttcctcgttggaacggtaaggattatattggcaatttagccaaacgggttccttgtgaccatccttattggactcaattgtttcgtcgttggtttcttagtatggtcgcacattggcgtgggatgggtaagaatcatgcgaatagcacttcgcctatattgataggcccgcaagcttatcgtaagtctacattttgccgcttgatcttaccaccatgtttacaggcatattatacggacagtatcgatttcagtcggaaacgggatgctgaactgtatttgaatcgctttttattgattaatatggatgagttcgatcagattggcatcagtcagcagtcttttctcaagcatattctgcaaaagcctgttgtcaatacgcgacgtccgaatgcttcggcagtggaggaactccgccggtacgcttcttttataggcacaagtaatcataaggatctgttgacggatacttccggcagtcgccgttttatcggtgtcgaggtgacgggagtgatagatgtggtccgccctattgattatgagcagttatatgcacaggcaatggctgcattgcggagtaatgagcgctattggtttgatgaaaaagaggaggcgattatgacggaggctaaccgggagtttgaacagtcgccggcgattgaacaattgtttcaggtatattaccgggcagcggaagaggaagaagagggagaatggttgcttgctgcggatatattgcagcggatacaaaaggcaagtaaaatgaaattctctgccggacaagttaattatttcggacgtatattgcagaggctgagagtaaagtcgtttaggaaaacacgtggggtttattatcatgtgatgcctgtagagtaaggatgatgatgaaataatgtatagtagatggcttttattattttataataattatctttgcgtaataacgtgagatgtatgaagactatgataagaaatccttttataacaagcggatatgtctctgctgattatttttgcgatcgccgttttgagagcgaacagttggtgcgcgaggtgatgaatgggaataatttggctcttgtctctacccggcgaatgggaaaaacagggctgatccgtcattgctttcagtttcctgaaattaaacagggttactataccttttttattgatatatatgatagccgttcattgcgtgatttggtctttgcacttagtaaggagattttggaagtactgaaacctatggggaagaaagctttgcatggcttttgggaatgtgtaaaatctttgcaggctagtatctcttttgatgtgaatggtatgccttctttgaatctgggattaggagatatacaagctccggctactacgcttgatgaaatcttccggtatttagagcaagcggataagccttgtttgattgctattgatgaatttcagcagattactggatatgtggagaaaaatgtagaggctactctccggacttatgtgcagcattgtaataatgcgcgtttcatttttgccgggagccagcgacatgtgatggggaatatgtttttgacgccttccagacctttttatcaaagtgtgtcaatgatgcatttggaaagtattcctttagaagaatatattcgttttgcaagtatgcatttcaaacgtgcaggcaaagaaatagaggaaagtgctgttaccacagtttatcaacagtttgaaggaatcacatggtatatacaaaaagtattgaatacactttatgatatgaccccggagtacggagtttgtaaagtgggaatggtgtcaggggctattcggcagattattgattcattcagatatacttattcggaaattctttttcgtttgccggagaaacaaaaggaactgctaattgctatcactaaagaaggaagggctaaagctctcacttccggcacttttattaaaaaatacaaactggcttctgctagttcagttcaggcagcactaaaagggttgctggaaaaggattttgtgactcaggaaatgggtatttgtcaaatatatgatcgtttcttgggtatttggctgaaagagaattattaagtcatatttcatttattgaagagggcttttcgataaatcgcgttaataattaatagaaactgctgcctgttaatctgttttattgtatctttgcggtcttaacttttttaatggtaaataatgaaggaatttctacaactaatgcgacgttttgtgtcgccttataagaagtatatcggctgggctattttgctgaatattttgtctgctgtattcaatgtgttctcatttacttttttgattcctatcttgagtattctgtttaaaacagaaggagcagataaggtgtaccattttatggaatggggtagtggcgatttagcagatgttgccaagaataacttctattattacatctctcagatgattgtggataatggtcccactgtagctcttattttcttgggactattcctgatggtgatgacattgtttaaaaccggttgttactttgcttcttcagccgtgatgattccattacgtacaggagtggtacgtgatattcgtattatggtgtatgctaaggtaatgcgtctgccgatgtctttcttctcggaagaaagaaagggagatattatagctcgtatgagtggtgatgtgggggaagtggaaaattccattaccagttcattggatatgttgatgaaaagcccgattctgattattatatattttgtgacattggttacggttagttggcagttgactctttttactatcattgtattaccgggaatgggttggttgatgggagtcgtcggaagaaaactgaaacgtcaatcactggaagcacaggctaagtggagtgatacgatgtcacaattagaagaaacactgggaggcttgcgcatcatcaaggcttttattgcggaagataaaatgattaaccgcttcaccaaatgtagcaacgagctccgggatgcgacaaacaaggttgctatacgtcaggctatggctcatccgatgagtgagttcttaggaacgattctgattgtagctgtattgtggtttggaggtacattgattttaggaaagaatgcaaccatcgatgctcctacattcatcttctatatggttatcttatatagtgtaatcaatccattgaaagactttgctaaagcgggatacaacattccgaaagggttggcttccatggaacgtgtggacaaaatcctgaaggcagagaataagattaaggaaattccgaatccgaaaccgttgaaaggtttgaatgatagaatcgaatttaaagatatctctttcagctatgatggtaaaagagaggtgttgaagcatgtaaacctgacagttcccaaaggaaaaacaatcgcactggttggtcaatcgggatccggtaaatctacattagtcgatttgttgccgcgttaccacgatgtgcaggaaggtgatattaccattgacggaacaagtattcgtgatgtacgtattgcagatttgcgcagtttgattggtaatgtaaaccaggaggctattctgtttaatgatacattcttcaataacattgcttttggtgtggagaatgcgacaatggaacaagtagtagaggcggcgaagattgccaatgcgcatgatttcattatggagaaaccggaaggatataatatgaatatcggtgaccgtggcggaaaattgtccggtggtcagcgtcagcgtatcagtattgcgcgtgctattttgaagaatcctccgattctgattcttgatgaggctacttctgctttggataccgaatcagaacgtcttgtacaggaagcgttggaacgtttgatgaaaacacgtacgacgattgctattgcccaccgtctttctacgattaagaatgcagatgaaatctgtgtactgtatgagggtgagattgtggaacgtggtaagcatgaagaactcattgagttaaacggttactataaacgtctgcatgatatgcagcagttgtaattcttgatattgcaatgatattattaagttttgatacagaagaatttgatgtacctcgcgagcatggtgtagactttccgctggatgaagcaatgaaagtgtcagtctatggtacgaacaagatactggactgcctgaaaaaaaacggggtgaaagctactttcttttgtacaagcaattttgcagaaaatgcgccggaagtgatgtggcgcattatggacgaagggcatgaagttgctgcgcatggatgtgaccattggcagccacaggcttcggatgtcagtcgttcaaaagaaattctggaacgccttaccggcaggacgatacaaggttatcgccagccgcgtatgttccccgtatcagatacggaacttgaacggatggggtatgtatataactcctcattgaatcccgcatttatccccggaagatatatgcatttgtcggagccccgtacctgctttatgacgggtaagttacttcaaatcccggcttctgtaactccgtggattcgcttcccgctattctggttgtcttgtcataatctgccgatgtggctgtatcaactcctggtaaaccgggtattgaagcatgacggatattttgtgacttatttccacccgtgggaattctacccgttgggtgaacatcctgaatttaagatgccttttattatccgcaatcattccggtaaaggaatggaagaacgtttggatatgcttatccgcaaactgaaagaaaaaggatatgcttttatgacttactcggaatttgcacagataaaactggctgaactaaataaaccggacgaaaaatgataaaattggctattgtatccccctgctataatgaggaggaagtgttggaagattcggccgcccgtttgacagccttgtttgatgagttggtggcgaaagaaaagatcagtgccgacagctttgtgctctttgtgaatgatggcagcaaagatcgtacatggagcatcattaagaaattgcacgggacgaatccttatataaaaggaatgaatctggcacggaacgtgggacatcagtatgcgatcatggccggtatgatgaccgctaaagactggagtgatgccgttattaccattgatgccgatttgcaggatgatctgaatgcgattgaggagatgatcgatgcttatacgcaaggatatgatgttgtatatggagtgaaagtatctcgtcaggcagaccccgtgttgaaacgtctttctgcaacagccttttataaattacagcaccggatgggagtggagactatctacaatcatgcggattttcgttttctaagccggagagtgctggaacagttgtctcattatcaggaacgcaatgtctatctgcgtggtattatcccgttgctgggtttcccttctactacggtagatgatgtgattcgggaacggacagccggaacttccaaatatacagtgagaaagatgttcagtctggctttggacgggataacctctttctcggtaaagcccatttacggaattgtttatctgggaggtatctttgtttttatcagtattttgattggaatctatgttctttacgcattgatttcgggtactgcggaacatggctgggcctctttgatgttgtctatctggtttgttggcggggttgttttattatccataggagctgtcggactgtatattggcaagatttataaagaggtaaaacgtcgtccgctctataatgtggaagaagtgttgtacgatgatcagaataagtaaggctatacttgagaagcacccggattggcgggataagttctggcagtttgttcgttttggagttgtcggcactatatcttcagccattcattacggcgtatattgcctggtcttgttggttgcgaatgccaatatctcctttacggctggttatgctgtaggatttgtctgcaactacttcctgactactttcttcacctttcgttccagaccatcctcgcataatgcgatcggctttggttttagtcatctgattaattacctgcttgagatcggcttactgaatctcttcctctggataggggcgggtgaactgcttgcaccgatactggtaatgattatcgtggtgcctatcaatttcctgattcttcatttcgtttatatctataaagggaggaaataacactattcaatccctttcatttaattcataaaaagaaaaggctattatgaaacgttttctaaatcttgttgtatatattcttaccatacatgtttcggctttactgatcgcaggactgtttcgcctggtactttttatctcatcttatcatcagttgacctctgaagccttgtcggataagacacttccgatgcttgcttttgtgcatggtgtctggtttgacaatgtgataggctgttacatacttctgttgcctctggtagttgcggtggtatgtggagtttgcaactattatgggaaagcgttgttccgtttctttacgatctttttcagtgtcttttatggattggtttatttaatcagtgcgtcagacattccttattttgcctatttctttaaacatatcaactcttccatattcgaatggttcggttatgcgggaactaccgccggaatgatattgggggaaagtgcctattatctgtccatcggattattccttctctttctggccggattcgtagtttggcttatctatctggcacgttatttccatcatcgtagccttaccatttccgctccgtttccttattggaagcgaggaggggcggttctgatcggtgcttgcttaatcggactctgcatctttggaatccgggggcgtacaggctataacccgatcaaagtaagtgcggcatatttctgtcaggatgcttttctcaatcaactgggagtaagtcctacttttaacctgctgacgagtgtgatggatgatatgaggcctgaaaataaatatttgcatctgatggatgaacaggaagccatcaccaaggcgcaagctctgctcaaccgtccgggagatgcgaatgtttccccgttggctgtttacaggcatgctgcaaaagcggatagcgtgcaacaacgccgtcctaatgtcgtcttgattatgatggagtctatgtccgccaagtttatgaagcatttcgggcaatcggagactttgactcctttcctggatagcctgtatacccgttctatcagtttccgcaatttctattcggcaggaatccatacgaaccatggtttgtatgccaccttgtattcttttccggctatgatgaaacggaacctgatgaaaggctctgtcattccccgctattcgggactgcctaccgtactgaaagaaaacggctattacaaccttttctttatgacgcatgaagggcagtatgataatatgaacgctttcttccggacgaacggctatgatgaagtgttttcacaagaaaactatccggctgataaggttgtgaatagctttggagtgcaggatgatttcttgtatgactacgcaattccggtattgaatcagcgggctgccaccggacaaccgttttttgctactttactgtccatcagtaatcatccgccgtatgtgatacctcctttcttccatccgaaaacaagtgaaccggagacgcagatcgttgagtatgcggattgggctttgcgtcagttctttgaagaggcgcgtaaacaaccctggtttgataatacgatattcgtattggaaggggatcatggcaaactggtgggagacgccgaatgtgaactgccggaatcttataatcatattccactgatgatttactccagccgtattcagccggaagagaaaactacatttggcggtcaggtagatatacagccaacaatattagggctgttgaatattgattatctacagaataattttggagtggacttgctgaaggaagaacgtccctgtatgttctatactgctgacaatatggtggtgggacgcaatgacacgttactctacctttataattacgagactcagcaggaacttacttatgatatcggtaacggcaaattgaatgctgttccgatggatgatagctttttgcctttaaaagaatatagtttttccatgctccaatcggcggagttccttgtgaagcatggaaaaacgcttaattctataccttttactcaacaataggagtcgtttcagtattttcaggctgttggtttttaacgaacttgtatatcttggctatttgccggagtactcgtttaggggattcatatacctcctcaaactgatacccttctttctcgaattcgggaagatatttctctgcatcattcgtgccgattaacaagaaaccttccgaaggacgtttctcatagaagttgtcgagacgattgtgcagatagaaattgagttcgaaaaaatgtacggggtcacctgctgcatgcagactttcttcaatgaattcgtacatcgttccttcgctttccggcgcaaccttttctatttctgtagcgatgaatttgaccgacttcgaatttaatgctgccggctgataagcaccgtccaatgcaaggtataatcccattgtaagcacaacgagagcgtataggaaacggttgttcaatgcatttttccgttgatagaaccaccagtagataccgagaatggtaggaatggcaatcaggaataaggcccctgctccgctgatattctgtattgcacgcatgaaattaatattgtcctgcgcgtgacgaccctggaaaatagtttcagggatgagtccgcattttaatacgatgaagcaggtgaacagtagcaggctgattactgcaagaatacttccgtataccttgatgactttagattgcttcttgaccagatagaatagatatttggcaaggaaataagcaatgaaaggatagatcggcatcagatatacactacgtttgctctgcggaatacagtagaagacgaagattacaacgatactggtgaaagagaataaatccaccgggtccatattctttatccatctggtgaagcgtttccaccaggctgccggttggatgctgaatttatggtaagtcaggctgaacagggagagcacgactaacagtgtccagggaacgtatccggcaaatagggtcacaaaattataatgccaggggttcacgcatgaattgtaactcatggtattagtcatacgaccgaagttttcttccataactaatgccaggaactcttcaccaccttgttggtaagcagcgacataccagcagaaaggcaggatgagtgaaagaatggcccaagcggaaagtaacaggaaggctttgaagaagttgacaccccggagtaataagaagatgcctaccactaaacatggaatgatagtacctaccggtcctttcgtcagtgtgccgcagctcatcaggagaatggccagccagggaatacctttgagtcccttctcataccatttgtagagacaatacagagcgccaacggtgagtgctgtcaataccatatccacccggcagtttgctccggcccggtgcagctcaaaattagtcagggtaataaaggcagccaacaacgccagttccactccttttcttttggcaaagaacagaaagccgcagagggtcatggcgatcagggcgatggcagacggcaagcgggaggtcatttctgtgacttgccctccgtttactgctgccgaaacagcggctatactccagtggaagaaaggcggtttgtaagccatttctcctccgttgtttctgggtaaaatccagtttccgctatccagcatggagtaggagacaatagattcgcgaggctcccctttggtgtggtactccgataaaccgaggaaaggcaggatagtaactacgcaaatgactagtaacagccagaaagctttgtttgaagtcaatgttttcatctttatcttatattgaaatttatgttcttttattttctgccgaagtcggccggaatttctccccattctttcgtttcccatttcagaataggggtggtataggtgtttccctgcaaccatttttctgcccgttcaatcaacagaaagagttcttctgtttccggggtccgggggagcttggtcttgcacttcttctgtcgtacccagctgatggcattcgcgctgtcactgtaaatgggcatatcgaaacctttctttttcaacaacgccaacccgtgtacgatggctagaaactcgccgatattattcgtgcctttcatcgggccgaaatgaaaaatctcctgacggctggcaatgtgtacgccgcgatattccatcggtcccggattaccgctacaggctgcatcgacagccaggctattgtcgatcacacaagagggtaaggtatccgaagaaggtttgggacctcctgatttagcctttgcattcttgccgatataagcatagggagacattgtcaacgcgcgttccgcttcttcgcgcgtgtcaaatgatttgtatttggcagcttcatatcctttgatttgaagctggcagtctgtccaggaagtataaactccgggggtgacgccttcccatactacataaaatttctgtttagccattttttctgacgataattttagatagtcaatgaattgacgctgcgaaggtacaaatatattctctaactgaacaagttaggggggctacttgttataaaaaaaagagagttttaagaatataaaataagaaagaaactatgatggaaagatcttttagtgaagctttgaaacaacgtcgaacttactattcaattactaatcagtcacctatatccgatcaggagatcgaatgtatcgttaatatgaccgtgcgccatgtgccgtcggcattcaattcgcaatctacccgtgtggtacttctattgggagaatcgcataagaaattgtggcagattgtgaaggacgcattaaagaagattgtaccggctgaagcgtttgtcaagacagaagagaagatagatcattcctttgcctgtggttatggaactgtactgttctttgaggatcaaaaagtggtgaaaggacttcaggaggctttcccgtcttatcaggagaatttcccgggatggtcattgcagacttctgccatgcaccagttagctatctgggtgatgctcgaagatgtaggtttcggagcatcgctgcaacactataacccgttgattgatgaagaagtgcgccgtgcatgggatttgccggaacattggcatctgattgcggaaatgccgttcggacttcctgtcggcaaaccgggtgaaaaagaattccagccgcttgaagaacgggtgagaatctttaaataaatcgggaatgaagaatgaataatgaagaattggatggcataatggctaaaattctttattcttcattcttcattcttcattaaatgattaattttgtgagcaaaattaatcatttatggttcgtatcttccttaccggctatatgggtgccggaaaaacgacgttgggtaaggcttttgcccggcatatgaatataccgttcatcgatctggactggtatattgaagagcgttttcacaaaaccgttggagaattattcattgaacgaggcgaaacaggattcagggagctggagagaaatatgctccatgaagtagccgagtttgagaatgtggtaatttcgacggggggtggagcgccttgtttttatgataatatggattttatgaaccggaccggaaagactgtttttctggaggtgcatccggatgtgttgttcaggcgcttgcgtgtggctaaacaacaacgtcctattcttcagggtaaagaggatgaagaactgaaagcgttcattattcaggcactcgagaagcgtgctcctttttatcatcaggcacaatatatctttaatgcagacgaattggaagatcgttggcagattgaaacatcggtgcaatgtttgcgacaacttttggggttgtagaagtaacagtcgttatattttgtgtaatcgtcatttggaaagctgtggaatgtgtgtaatttgtgcctgataatgaatgattattgggaggaattttactgtattcagaaatcaggtagttgtaatgttctctttttgttggaacttcgttttttttgagactcttgtttgtgcattcggtcaatatttgtaccttgcactcgttatgagattttttattgactagtaacacaaaattaaggtaaagttctatatcatgaaaactttaaaagagaaatttggggagttatccgctaaaattaaagcatccggacagcctgcaagggtatggtttccgcagtatacaccggcttcattgttaagtgcggaaaactggtgggaagcattggctgtatgtgaatatgctttggacacaaaagaagacgagaaattaacagaagatttttttgaactgatattcagtgcttttgactgtaacgtagaggtagaactcaacgcggaagaatatgaattctggtgggaaaaggtgatgcaggtatgcgaccgtgtggcagagtttagcggtgcgggatgggcgcagaagggtgcacaatattccgaagcccgttatggaaagcgggacatgagttatttgtttccatgctacgagaaggccgccgatatgggttgggctgaagcggaagcaactgttgcctattggcgatacatgggattctattgcgaacaagataaagaagagggtgaacggcgttttgcagctctcacttctcccgaagctattttatggggaaagcattatcgtgcttttgccgaagaatttacaggggataaagcaaaggcattacagatacggaatgaactgcttgccgaactgcctgaaggagaacgtttgcgtgctcatgtatatgcagcgttgggggatgcgctcgacagggcggaaggtaacgtggcagaggaagctgcttattacgaaaaagccctggaaatagttcccaatctttatagtcttaaaaatctggctacgctttatttccgttacccggaactgaataaaccgaaagaactgagctttgaactttgggaaaaggcttggcatgccggtgtgtggtctgccgccaatttcctgggatataactatcaggaggaggaatggctggatatgcctaaggcgattgaatggctggaaaagggcatgctttattgtgaaccctacagtgcgtatgaactggcattgatctacctgtataatgatgaatataagaacgtggaacgtggactgatgtgtctgaaccgttgcgtggaggatgattatatacaaggtatcgaaggactggccaatatttatttcaacggtgatttggtgccggaagacatgaatcgcgcgaaagagttgttggagaaagccattgagttgggttcgggaagtgcagcttatcgtttgggctggatgtatgaacgtggcttcttgtctgaagaaccggattatgtgaaggctttagagttttatgaaaaagcggcttcactgaataatgccgatgggtattgccgtgtggctctttatctggctaatggatatagcggtgtgaaggaccctgtaaaatcaagggaatattatgaaaaagcggccgaactgggtgcttgctttgcccttgtggaactggcattcttatatgagaatggcgatggagtggagaagaattatgaaaagtcatttgaactgattagcaaggctgccgaacagggttatccttatgcaatgttccgtgtaggtctttatatggaaaagggtgttcttggtgaagtgaaaccggaagaggcctttgcctggtatacaaaggcagctgaagcggacgataatgatgcgatctttgctttgggacgttgctatagagaaggtatcggaacggaagaaaactgggatagggcactcgaatggtttagtaaaggggcggaaaagaatgaagcccgttgtctgacggaactggggatggcttatgagaatggtaatggcgtggaagagaatccacagaaggcagtggaatatatgatgaaggctgctgaacaggattatggctatgctcagtttaagatgggagattattatttcttcggttgcggtccctgtctggaagataataaaacggcagtggaatggtatgaaaaggcagtggctaatgagattccgatggctatgctgcgtgtgggtgagtattatctgtatgactatgatagcctgaatgagtcggaaaaggcttttgcttatttcaagaaagctgccgaatatgaatggtatagtgaaggactgggtatctgttatgaaatgggtatcggagtggaagagaatgaaacggaagcctttaaatattatacactggctgcggataatggaaatacgacaagtatgtatcgtaccggactttgctattataacggagtaggtgtgaaacagaattatgccgaggcctatcgctggttcacggatgcggcggggaatgagaatgtcgctgcaatttattatctgggcaagatgatgatgtatggcgaaggttgtaaccctgatccggaagctgcagtgcaatggttgctgaaagctgccgagaaaaataacgataaagcacaatttgaacttggaaatgcctatttgacaggaaatggcgtggaagaaaacgatgaaattgcaatggagtggttcgaaaaggccgcagagcatggcaatgagaaagctcttaaaatcaccggaaggaggaggaagtaaaagaggaacatggaaaaagaaggaaataatctgtttcaggtcaatcttaaaggtatgattgccctgttatcagagcacatttatagtaacccgaatacttttgttcgcgaactgttgcagaattgcgtagatgccatcacggcactacgcaatattgacgagaattataaaggtcgcatcgatgtctttctgaatgaggacaagacagtggtatttcgggataatggtatcggactgaaagaggaggaagtttatcgctttctgactgttatcggggagagctcaaagcgggatactcccgatgcggacgattttatcggaaggttcggtatcggattgttatcttgttttgtggtgaccaatgaaatcaccgtagagagtcgttctgcaatgggcggacagcctgtttgctggtgtggaaaagtggatgggacgtatcagctgactttatcagacgaagaacggcccatcgggtcgcaggtagtattgcacccgaaaggagattggatgcatctttttgaatatgaaacatttaagaagatactggtcggttacggagaaatgctgccgtatcctatctatctgcattatcagggggaagaggagttggtaaatacgccttcgcctgtatggcttgacccgaaggcgactcgtaaggagttgctggattatggagcgaaagtgtttcaatcgtctgctctcgatgctttccggatctatactgaaagcggcaaggtggaaggggtgctttatgtcctgcctttccgtacacaattttcagtgcgcaactctcataaggtctatctcaaacgtatgctgttgagtgaggatgattgcaatctgttgccgtcgtgggctttctttatccgttgtctggtgaatgcggacgggttgctgtctaccgcttcccgggagtctttggtgagtaatgaccaactgaaagatgcccggaaagagatcggggtggctatcaaggattatctgcggggattggtgcagaatgaccgtgccatgttcaatcggattctggatgttcatcactttcatatcaaggcgattgcttcggaggataatgaattgcttcgtttgtttatggattatcttccttttgaaaccaataagggtttgcgtagttttggaagtattcgttcggcaagcaatgtgatatgttataccaagaatctggaggatttccggcaagtgcggcgtatagccggagcacagggttggctggtcgtgaatgctgcttatacgtttgatgaaacgttgttgaaaaagtatgtccgcctgaatccggaacttactttggatgaaatatctccttcacggttgctggagcagtttggtgaagtggaggcgaaccaggagtttcaggcttttgaggtgaaagcgaacgagttgttgaagcggtttggctgtatctgtcgtctgaagcattttactccggtggatattccggttatttttgtggcggaggaaaaggagaatgccgctaaaagtgctaataatccgttggcggctgtactgggagctgtgaatactacaaagcagattccgccgacactcactttcaatgcggataatgaaatggtgcagaccttattgcaaatacaaggagacaataaactgtttcagcatgtggtgcatatattgtatgtacaatcgcttctgcaaggtaaatatccggtaaacagcgaagaaatggagcttttcaaccattcgctaagtgaactgatgacttcgaaaatgaatgattttataaatttcctgaattaaaaaaagagtatgagatacacacttgaaatacaaaaattgctgttgcagacacagaataacaacctgcatccccgcgaaaaagccaatctattgaaagaagctatccgcatcgccgatgagaacgaagatgtggaatgggctacggagttgagactggatcttatttatgaactgaatcttctttcggcggatgctgaagagattaccgtgttctctaaaattctggatgattacgagaaccacaaggatgtgattaaggaagatgacttgttgtggaaatataagtggatatgggcttgtacgttcgatcttccggagatcccgatggagcaggtacaggcaattggggaggattataaaacccgtatcctccggaacgggtattctttgcggagttattatcaccgctggtctgtggaatgtgtctggatgcggcagtatgacaaggcgaaagaatacattgataaaatgttgaatgagaagatagacgatcagtcgtgtgaggcttgtgaattgaactttatgctggattattatctggaaacgggacagtttgatgaggcttacagccgcgcgcaaccgttgattaataagcagatcacttgttatgaagccaatttgcgggcctatttgaagcttgcttattatgcgcagaaagcaggtaaaccggagattgccgccgatatgtgtgcacgtgccgaagaagcattggtgggaagagagaaggatgaatatcttttgctctatctgggattgtttattgcctataatatgatgacgaagccggaaagagcttgggaatatgctgaacgctgtattggttggagtttgcgtactaatacgctgaagagttatcgtttctcctgtgatatggtagaggctctgaaatatgaaacccgtccggaagtctcgttgtctttgccggaagagttcccgctttatcgtccggatggaatttatcaggtaaacgaacttcgcaattatttctatcaacaggcagaagagctggcacgtcgctatgacgcccgtaacggaaatagtggttatatggaccgtttgaaagatttaatgtctaattaattgccaacatgtagattaatccgtatttttgccgtccaattatttactaaaaacactgaataacagaaaatgagaaagtggcgtattgaagattctgaggaactctacaacatcacaggttggggtacctcgtactttggtattaatgacaaaggtcatgtagttgttacacctcgtagagacggagtgactgtcgatctgaaagaactggtcgatgagttgcaattgcgtgatgtggcttctcccatgttgatacgttttccggatattttggacaaccgtattgaaaagatgtcttcctgctttaaacaagcggccgaagagtatggttataaagccgagaactttataatttatccgattaaggtcaaccaaatgcgcccggtggtggaagagattatcagccacggaaagaagttcaatctcggactggaagccggttccaaaccggaactccatgcagtgattgcggtcaatacggattctgactcattgattgtctgtaacggatataaagacgaaagttacatcgaactggctttgcttgcccagaaaatgggtaaacgtatcttcctcgttgtagagaagatgaacgaactgaagctgattgcaaagatggcaaaacagctgaatgtgcagcctaacatcggtatacgtatcaaactcgcttcttccggtagcggaaagtgggaagagtctggaggtgatgccagcaaattcggcttgacttccagtgaacttctcgaagcgctcgacttcctggagagcaaagggatgaaggattgtttgaaattgattcatttccatatcggcagtcaggtgacaaagatacgtcgtatcaaaacggctttgcgtgaggcttcacagttctacgtgcagttgcattcgatgggattcaatgtggaatttgtagatattggcggtggactcggagtggattatgacggaacccgttcgtccaatagcgaaggcagcgtgaattattccatccaggaatatgtaaacgactctatttctactttggtggacgtgagcgataaaaatggtatcccacacccgaatatcataacggagagtggacgtgcattgacggcacatcattctgttcttatctttgaggtacttgaaaccgctacattgcccgaatgggatgacgaggaggaaattgctccggatgcacacgaattggtgcaggagttatatggaatctgggattcgctgaaccagaacaagatgttggaagcatggcacgatgcgcagcagatcagggaggaagcattggacttgttcagtcatggaatcgtggatctgaaaacccgcgcacaaatcgagcgtctgtattggtctattacacgtgagattaatcagattgcagccggtttgaagcatgcgcccgatgaattccgtggattgtccaaactgcttgccgataaatatttctgtaacttctcgttgtttcagtcacttcctgactcttgggcaattgaccagatattcccgatcatgcctattcagcggttggatgaaaaaccggagcgttcggctaccttgcaagatataacctgcgactcggacggcaaaattgccaactttatctctacccgtaacgtggctcattatctgcctgtacatgcactgaagaaaacagaaccttattatgtggctgtgttcctggtgggagcttatcaggagattttgggagatatgcataatttgttcggtgatacgaatgccgtgcatgtttcggtgaacgagaaaggatataatatcgaacagattatcgacggagaaacggtagcggaggtgttggactatgtgcagtacaatccgaagaaactggtacgtacgctcgaaacttgggtgacgaaatcagtgaaagaaggaaagatttctttggaagaaggaaaagaattcctttccaactatcgttcggggctttacggatatacttatttggaataaccggcagggggccggagccggattctccattcggtgaacttattagaaatcaagaaatgagagaaaaactaacagttattaaggtgggtggcaaaatcgtagaagaggaagccacccttcgtcagttgttaaatgactttgccgctatcgacggacataaagtgttggttcatggtggcggtcgttcggcaacaaagattgccgcacaactgggtattgaaagcaagatggtaaatggtcgtcggattaccgatgccgaaacattgaaagtcgtaacgatggtgtatggcggattggtgaataaaaatattgtggcaggtctgcaagcacgcggagtcaatgcactcggattgaccggtgcggatatgaatgtaatccgttcggtgaaacgtccggtgaaagaagtagactacgggtttgtgggagatgtggaacaggtggacgctactttattgtcggatttgatacataaaggcgttgttcctgtgatggctccattgacgcacgacggccacggcaatatgctgaatacgaatgcagataccattgctggggagacagcgaaagcgttgtcggccttgtttgatgtgacattggtatattgttttgagaagaaaggcgtgctgcgtgacgagaatgatgacgacagtgtgattccccaaatcacccgtgccgaatttgaacaatatgtagctgatggcgttattcagggaggtatgattcccaagttggagaattcttttgaagcaataaatgcaggagtatctgaagtggtaatcaccttagcatcagcgattaataactctggtggaacaagaataaaaaaataattcaaaaaaagtagtgggcgactgtaacttttcatatcctagcccgtcattattatagagatgcaagaaatcagcttccgaaacgatattttgccgttgaaggataaactctttcgattggctctcagaatcaccctggatagggccgaagccgaggatgtcgttcaggacaccatgataagagtgtggaataagcgtgatgagtggtctcaatttgaatcggtcgaagcctattgcctgacagtggcaaagaatctggcgatagatagaagtcaaaagaaagaagctcaaaacgtggaactcacccccgagatggaggaagaacctgatgcaaacagtccgtatgaccagatgattcatgatgaaagaatgaacattattaatagactggtaaacgaacttcccgaaaaacagcggcttatcatgcaactgagggacattgaaggtgaaagctataagaaaattgcagggttgctgaatctgacagaggaacaagtgaaagtgaacctcttcagagccagacaaaaagtaaaacaaaggtatttaaaaattgacgaatatggattataaggatatagaacagctcctggagcgatactggcaatgcgaaacttccgttgaggaggaagcaacattgcgcgacttcttcgcaaaggaggaagttccggctcatttgcttcgctataaaaacctgtttgtttatcaacaggttcagcaggaagtaggactgggcgaagactttgatacacgtattctggcagaggtggagcctacggtcgtaaaagcgaaacgcttgacactgaccggtcgttttattcctctattcaaagccgctgccgtgattgcaatcatcctttctttggggaatgtggcacaacattctttctccggagatgacggaagtgtattggcaacggataccattggtaaacaagtaacagcaccatcggtcgctatctcaaatgatgtgaaagcggaacaggttctggctgatagcctggcgaagatcaaccataaggtgcaagttataaacgaatagacattttcatttgctttaaacatataatatagttagtgtgcttaattaaaacaacaacgaaggcgaaactgtgaagttttcaattctctcaaatttttataatgaaactaactaaataaatgggctaccgcgtgatgcagtagcccttttatgcttttagactgtatttgttcaaattgtctttatttgatctgccgtatgtttttccgtggagcatccacttcttgtggattgcctttataagcaatatcgccacttcctttcacgcgggcaaccagtttttgacttgcataacaactgatgtttccggatccactgatacttgcatccgtattctctgcttctaaatctgcggcctgaatgtttcccgatccggcaatagcatattttgcttgaatggctttacctttaagattaatattacccgaacctgaaattcctgcctgacattcctggctctctatttgttgcagtctaacatctcccgatccgttaattgaaacagccattcttcggcaattaagcccttctccctgaatgttccccgaaccatttatatggaactcgatatctttagaggtttgtattccattgattaattttatatttcccgatccgttgattgacagcttattcagttccggagcaaaaacttttatttccagttttcctttccatatactgacattcttcttgaattttatcattaatgtattaccgtctacatacgtttctacaagtggtataatgttgtcggaaccatgtatctccacgtgactgcgtgtgtcttggtgataactgatattggcacttcccaatagtttgatttcattgaaatgatcggcttttacttcttgggagatgtagtttttgctgcctactacgtgttttccctgcaagcaagagccggcagtaagtactagagacaatccggtgactaatacgagcaataaacttgttttcataattatgtttttctatgattgatatgacagttagacggaagaaactgatataaagttgcatcttccgcgaagtttttcattggaatcttcttttttattacttttgtggctgttgataggaggattataatggataagatcgtagaagatgacgaattaggacgtctgatagtgcgtgtcaattcacgtgcgaggagtcttgtgtttcgtacaaagagtgatgctgtttatgtttcagttcctcccggcactacattgaaagaagtgaagcaggcaatcgagaatctgcgtggtaaacttctggcctcccgtcaaaaattagcccggccattgattgatttggactataaaattgatgcggaacactttaagttgtccttggtgtccggtgaaaaggatcagtttctggctaattcccggttgggggttatggaaattgtttgtccgcctcatgcggattttacggacgagaaactgcaaagctggttgcataaggtgattgaagaatcgttgaggcggaatgcgaaaagtatccttccttcacgtttggcttccttgtccaagcaatgcggacttccttattcgagtgtgaaaataaactccagtcagggcagatggggcagttgctcggctcgaaaggatattaatttgtcctattacctggttctgttaccttctcatttgatagactacgtgttgctgcacgaattatgtcatactcgcgagatgaatcatagcgaacgattttgggtattgctcaatcaatttacagaaggaaaagcattggctttgcggggggaattgagaaagtatcgtacggagatttagaatactttattgccaggatagtgctatcgtgttggcacacttgtgtcaacacgctggcacagtcgtgacaatgcgatggcatggttgtgccaatatggtggcacagacttagttaatacctttattacttggctaattgtttaatcccgtctgattctttttcgaactgataagttcctcctttttcactaagatcaaacgtagacactaattctgtgttattatctacaatcaacaaggcgctctgttcggcaaaacgtcctatttctacagtgtaaggttcttccgacatggttttgttggagatcagactgtcgttgacaaataaagagatagaatctccggcaaaaccttttaccagactgatcgtatagctttcgatgaaatgacgttcttcctgcttttcccgttgtagccgcatgctcatatagacaaaaataaccacgacaaaaatgacggcaaaagcaagaattccgttacctaccataaactgtttatttgtgttgagacgatgtgccatagtcgttattttttgaattacggcgtaaagatacgaatatagcactgttaattcatactttttttctttaatgttttgtagtcgaacagattatttatatctttgcaaccgaaaacggatgaaaggtggaggggcaattaagctcctttttttgttcttatatagctaataaatgatagaaaagaaaactgtttgtcagattgtagaagagtggctggaaggaaaagactactttttagtagaggtaaccgtgagcccggatgacaagattgtggttgaaatagaccatgcagaaggtgtttggattgaagattgcgtggagcttagtcgcttcatagagtcgaaactgaaccgcgaagaggaagattatgaactggaagtagggtcggctgggatcggacaaccctttaaagttctgcaacagtattatatccacatcggacaagaggtggaagtgctgaccggagacggacggaagctggccggtatactgaaagatgccgatgaagagaagtttacggtaggcgtacaaaagaaagtgaaaaccgaaggatcaaagcgcccgaaattggtagaagaggacgaaaccttcacttatgagcaaataaaatatactaaatacttaattagctttaaatagttatggccaaaaaagaagaaacaatcagcttgattgatacattttcggaatttaaggaactgaagaatatcgatagaacgacgatggttagcgtactcgaagagtcgttccgtagcgtaatcgcgaaaatgtttggcaccgatgaaaattacgacgtaatcgtgaacccggacaagggtgacttcgagatatggcgtaaccgtgaagttgtggccgatgaagatttgactaacccgaatatgcagatttcgttgagcgaagcacagaaaattgatgcttcttacgaagaaggtgaagaggtgactgacgaggttatctttgccaagttcggacgtcgtgcgatcctgaatcttcgccagacactggcttccaagattctggaactcgaaaaagacagtatttataataaatatatagataaggtaggtactatcatcaatgcagaagtatatcagatctggaaaaaagagatgttgcttttagacgatgaaggaaacgaattgctgttacctaagaccgaacaaatcccgagcgacttttatcgtaaaggtgaaacggcccgtgcagtagttgcccgcgtggataacaagaataataatcctaagattatcttgtcacgtacttctcccgttttcctgcaacgcctgttcgagatggaagtacccgaaattaatgatggtttgattaccatcaagaagattgcccgtatccccggcgaacgtgccaagatcgcggtggaatcttacgatgacagaatcgaccctgtaggagcctgtgtaggtgtaaagggaagtcgtattcatggcattgttcgtgaacttcgcaatgagaacatcgacgtaatcaattatacatcgaacatctcattgtttatacagcgcgctttaagcccggctaagatttcttctattcgtctgaacgaggaagagaagaaagcagaggtattcctcaaaccggaagaagtttcgctggctatcggtaaaggcggtttgaatatcaaactggccagtatgttaactgagtacactatcgacgtgttccgtgagttggatgagaatgtagctgacgaagatatctatctcgacgagtttagagacgaaatcgacggatgggtgatcgacgctatcaaagctatcggcatcgatacagcgaaggctgtgttgaatgctcctcgtgagatgttgattgaaaagacggacttggaagaagagacagtggacgaggtaatacgcattttgaaatcggagtttgaagaagaagatccttcaattgaaaataaagatgaaattaaagattaaaagttgcgatacaatataatgcagcagacttttatttcttaattctcaattttcaattaaacaagctccatttattcattaattttaaaatatgacgataaggttaaacaaagttacaagagatttgaacgtaggaatcgcgacggtagttgagttcctgcaaaagaaagggcataccgttgaggctaatcctaatactaaaattagcgaggagcaatacgctatactcgtaaaggagtttagtacagataagaaccttagacttgaatcggagcgtttcatacaggaacgtcagaataaggaacgtaataaggcgtcggtatcgattgagggcttcgaaaagcagcccgaaaaaccgaagtcggaagatgtgattaagacagtcgtacctgaggatgcacgtccgaagtttaaacctgtcggaaaaatagatttggataaattgaacggtcgtaaacctgaaaaggtagagaaagaaccggaacagaaacaggaagaaccggttgtggaacggcctgtcgttaaacccgaagtgaaaaaggagcccgagaagagagaacccgaggtgaaggaggaagaggtggtgacacctcctgtttctgtagtagagcctactccagtggtggttgaacccgtagtagtgccggaacctgtagtggagacgaagccggtagaagttgaaaaagtagtagaagaagtgaaaaaagaagagccgaaggtagtagtagctgcacctgtgaaggcggaagaacataaagaagaagaaaaggtggaaactgcacaggctgaagtaaccccggtagcggaaaaggctccggaggatgatggtgttttcaaaatccgtcaaccggaattaggcgcaaagattaatgtgatcggtcagatcgacttggctgcattgaatcagtctactcgtcccaagaagaaatcgaaggaagagaaacgtcgcgaacgtgaagaaaaggaaaaaatccgtcaggatcagaagaagttgatgaaggaagctatcatcaaggaaatccgtaaggatgattctaaattggcgaagagcggacctaaggacagtgcggaagcggctgctaacaagaagaaacgtaaccgtatcaataaagagaaggtggacgttaacaatgttgcaacttccaactttgctgctccaagacctaatgtacagggtaaaggcggcaatagtaacggtcagggtggccaggccaacggacagggaaataacaacagaagaaataacaacaataaagatcgcttcaagaaaccggttatcaaacaggaagtgagcgaggaagacgtagcaaaacaggtaaaagaaacccttgcacgtctgacaaccaaaggtaagaataaaacgtccaaataccgtaaagagaaacgtgaaatggcttccaaccgtatgcaggaactggaagatcaggaaatggcagacagcaaggtattgaagttgaccgagttcgttacggctaacgaattggcaacgatgatggatgtttctgttaaccaggttatcgctacttgtatgagtattggtatcatggtttccatcaaccagcgtttggatgctgaaaccatcaatctggtggctgaagaattcggattcaagactgaatatgtaagtgcggaagtggcacaagctatcgttgaagaagaagatgctccggaagatttgcaaccgcgcgctccgattgtaacggtgatgggacacgttgaccacggtaagacttctttgcttgactatatccgtaaggcgaatgtaattgccggtgaggccggaggtattacccagcatatcggtgcttataacgtgcaattggaagacggtcgtcgtattacattcctcgatactccgggtcacgaagcgtttaccgctatgcgtgcacgtggtgccaaagtaacggatattgctatcattattgtggctgccgatgataacgtgatgccacagacgaaagaagcgatcaatcacgcgatggctgccggtgtacctattgtatttgcaatcaataaggtagataaaccgactgcaaatccggataagattaaagaagaactggctgcaatgaattaccttgttgaagaatggggtggtaaatatcagtcacaagatatctctgccaagaaaggtatgggtgtggaagacttgctggaaaaagtattgctcgaagcggaaatgctcgacctgaaggcaaatccgaaccgtaatgctacgggttccatcatcgaatcttcactggataagggacgcggatatgtagctactgtattggtatctaacggtactttgaaagtaggagacatcgtattggcgggaaccagctacggacgtgtgaaggctatgttcaacgaacgtaaccaacgcgtcaaggaagcaggaccttccgaaccggcattgattctgggattgaatggtgctcctgccgcaggtgacacattccatgtagtcgaaagcgatcaggaagctcgtgagatcactaataaacgtgagcagctggctcgtgaacaaggtttgcgtacgcagaagatccttacattggatgaattgggtcgtcgtattgctttgggtaacttccaggaattgaacatcatcgttaagggtgacgtggatggttctgtggaagcgttgagcgattcgttgattaagttgtctacggaacaaattcaggtaaatgttatccataagggtgtgggagcaatttctgaatctgatgtttctctggctgctgcttcggatgcgattattgtcggattccaggtacgtccttcgggtgctgccggtaagatggccgaccaagagggtgttgacatccgtaagtattctgtcatctacgatgcaatcgaagaggtaaaggctgctatggaaggtatgttggctccggaagtaaaggaacagattactgcaaccatcgaaatccgcgaagtattcaatattacgaaagtcggtcttgtagccggagcaatggtgaagaccggaaaggtgaaacgcagcgacaaggctcgtttgatccgcgatggtatcgtaatctttaccggaaacatcaacgcattgaaacgtttcaaggacgatgtgaaggaagtaggtacaaacttcgagtgtggtatcagtctggtgaactgcaacgacatgaaggtaggcgatatgatcgagacattcgaagaaatagaagtgaaacagacgctgtaaatatagtaaggttataagtgtattataatgttataatatagcagaggtcatgattgataaagaggtggtaatgtggtactgtttgcagaacaccaccttaccaccttattttttatcattcggcaccttctcattataatcagcttatatacgacttattggtttatagcttataacataataaacgtggcaacgattgatataattatccttattgtaataggcgccggagcgattgtaggttttgtaaaaggcttcattcgtcagttggcttctattttggggttaatagtcggtctgttggcagcgaaagctctgtatgcttctttggcggaaaagctttgcccgacagtgacggattcaatgacagttgcgcaagtgttggcttttatcatgatctggattgccataccattgatctttgtattgattgcctcgctattgacaaaagcaatgcaggctatttcgctgaactggctgaatcgctggttaggaagtgggctgggagcacttaagtttctgttgttaacgagtgtagtgattggtgcgatagagtttgtggacagcgataataagttaattagtgcaacaaaaaaggaagaatctttgttatattatccgatggaaacgtttgcggggatctttttccctgctgcgaagaatatgacgcaacaatatatattagagaataaagataaagatgcaacaagaacccaataaaatgaaacccaatcagaaagacgaacttgaaaagaagactgataatgagtttgtccggaaatttgcggaggagaaatataaatacggtttcaccacagaggtgcatacggacatcattgagcgtggacttaatgaagatgtcattcgtctgatttcatcgaaaaaggacgaaccggagtggttgctggagtttcgactgaaagcgtatcgccattggctgacgctggaaatgcctacctgggcacatctccgtatccctgaaattgattatcaggcgatttcttattatgccgatccgacaaagaagaaagaaggaccgaagagcatggaggaagtcgatcctgaactgataaagacgtttaataaactgggaattcctttggaagagcaaatggctcttagtggaatggcagtggatgccgttatggactctgtttccgtaaagactaccttcaaggaaacgctgatggagaaaggaattatattctgctcgttcagtgaagccgtgcgggagcatccggatctggtgaagaaatatatgggctcggtagtaggttatcgggacaatttctttgcagcgttgaattccgcagtgttctctgacggctctttcgtgtatattccgaaaggagtacgttgcccgatggagctttccacttatttccgtatcaatgcccgtaacacgggacagtttgagcgtacgctgattgtagcggatgatgattcgtatgtttcttatctggaaggatgtacggctccgatgcgggatgaaaatcagctgcatgccgctatcgttgagatcattgtgcatgaccgtgcagaggtaaaatacagtaccgttcagaactggtatccgggagatgcagaaggcaagggcggtgtatacaactttgtgactaaacgcggtaactgtaaaggagtggacagtaaattatcctggacacaagtggaaaccggttcggcaatcacctggaaatatccttcctgtatcctgacgggcgataactcgaccgctgaattctattccgtagctgtaacgaacaactatcagcaggcagataccggaacgaagatgattcatctgggtaagaacactcgtagtacgattgtaagtaaaggcatttctgccggacatagtgagaactcctatcgtgggttggtacgcgtggccgagaaagcggataatgcccgtaattatagccagtgtgactctctgttgctgggagataagtgtggtgcacataccttcccgtatatggatattcacaatgagacggcagtggtagaacatgaagctacgacaagcaagattagtgaagaccagatattttattgcaaccagcgcggtattccgacagaagatgctatcggacttattgtgaacggatatgcaaaggaagtgttgaataaacttccgatggagtttgcggtagaagcacagaagctgcttaccatctcattggaaggaagcgtggggtgatgttgactttttaatagtaaatcgtaaaatcgtaaatataatcatgttagaaataaaagacctgcatgccagcattaatggcaaagagatattgaaaggtattaacctgacggtgaatcccggtgaggtgcacgctattatgggaccgaatggttccggtaaaagtacgctttcctccgtattggtgggtaatccggcttttgaggtaacaaaaggttcggtcactttttatggaaaggatctgttggagttgagccccgaagatcgtagccatgaaggaatcttccttagtttccagtatccggtggaaatcccgggtgtgagcatggtgaactttatgcgtgctgctgtgaatgagcaacgtaaatataaaggtctgcctgcactgaccgccagtgagtttctgaagctgatgcgtgagaaacgtgcggtggtggagttggataataaactggctaaccgttcggtgaatgaaggcttttccggtggtgagaagaaacggaacgagattttccagatggctatgctagaaccgcgtttgagcatcctcgacgagacagactccggtttggatattgatgcgctccgtattgttgcggaaggagtgaacaagctgaaaactcctgaaacaagtacaatcgttattacccactaccaacgtttgctcgattatatcaagcctgatattgtgcatgtcctttataaaggtcgtatcgtaaaaactgccggaccggaacttgctctggaactggaagaaaaaggatacgattggatcaagaaagaagtaggagaatgacaaatataaaacgatgatggttgaacaacaatatatagaacttttctcacagacggaagcgatgatctgtaagcatagtgccgaagtgctgaatgcacctcgtgcgtcagcatttgccgattttgagcgactcggatttccgacccgtaagatggagaagtacaaatatacggatgtgagcaagtactttgaaccggatttcggtttgaacttgaatcgtttggctattccggtcaatccgtatgaagtgtttaagtgtgatgtgccgaatatgagtacctccttgtattttgtggtaaatgacacattttataatagagcgcttcccacaggaaatctgccggaaggtgtgattttcggtagcctgaaagaagtggccgagcaacacccggaattggtgaagaaatattacggtcaactggcagatacctctaaagatggtgtgactgctttcaataccgcttttgcacaagatggcgttgtcttttatgtgccgaagaatgtggtggtggaaaaaacaatccagttggtaaatatcctgcgtgcagatgttaactttatggtgaaccgtcgcgtactgattatcctggaggatggcgcgcaagcccgtttgctgatttgtgaccatgcaatggataatgtgaacttcctggcgacacaagttattgaagtatttgctggtgagaatgcggtattcgatatgtatgaactggaagaaacacatacaagcacagttcgtatcagtaacctgtatgtaaagcaagaggccaacagcaatgtattgctcaacggaatgactttgcataatggtactacccgcaacacgaccgaagtgttgctggcaggagaaggagccgaaataaacctttgtggtatggcgattgccgataaaaaccagcacgtagacaatcatacaagtattgaccatgccgtaccgaactgtaccagcaatgagctgttcaagtatgtgctcgacgaccagtcggtaggtgcgtttgccggattggtactcgtgcgtcccgatgcacaacatacgaattcccaacagactaaccggaatctttgtgctacgcgtgatgcaagaatgtatacacaacctcaattggagatttatgcggatgatgtgaaatgttcgcatggagcaacagtaggccagttggatgaaggcgcattattctacatgcgttcgcgcggtattgcagagaaagaagcccgtctgctgttgatgttcgcatttgtcaacgaagtgatcgataccattcgtttggaagcgctgaaagatcgtttgcatctattagtagagaaacgtttccgtggcgagttgaatagatgtcagggttgtgccatttgtaagtaaccactaaaaaataatgaacgtggatattcaaaagatacgtgaagattttccgatattgagccgtacggtttacggtaaacctttggtttatttcgacaacggtgcgacaacacagaaaccccgtctggtggttgatgcgttggtggatgaatattattccgtcaatgccaatgtgcatcgcggcgtacattatctttcccagcaagctacggaactgcatgaagcttcccgtgaaacggtacgtgagtttatcaatgcccatagcacgaatgaagttgtctttacacgcggaacaacagaaagtatcaacctgcttgtttccagcttcggcgacgagtttatggaagaaggggatgaagtgattgtttccgtgatggaacatcatagcaacatcgttccctggcaactgttggctgcccgtaaaggaattgccataaaagtaatcccgatgaatgataaaggtgaacttctgctggatgaatatgaaaaactattttccgaacgtacgaaaatagtcagcgtagttcatgtatcgaacgtactgggtacagtgaatccggtgaaggagatgatcgcaacagctcatgcgcatggtgtgccttgcctgatagatgctgcacagtctattcctcacatgaaagtggatgtacaggagttggatgccgattttctggtattctccgcccataagatatatggcccgacaggtgtcggagtgctttacggaaaagaagaatggttagatcgccttccaccttatcagggaggaggagagatgattcagcatgtctctttcgagaagaccacttttaatgaacttcctttcaagtttgaagccggtacgcccgactatatcggaactaccggactggcaaaagcccttgattatgtgaacggacatggcattgaacagatagccgcccatgagcatgaactgacaacttacgctttgcaacgtctgaaagaaatcccccatatacgtatatttggtgaagcagccgaacggggagcggtcatttctttcctggtgggagatatccatcatttcgacctcggcacgttgctggatcgtctaggtattgccgtgagaacagggcatcattgtgcacaacctctcatgcaacgtcttggcatagaaggaactgtacgtgcttcgtttgccatgtacaataccaaatcggaaatagacactttggtggcaggaattgaacgtgtcagcaagatgttttaaagatatgagctgctattcctgtggagtagcggctttttttattctttaactaaaaaaagagggcctcgagtgcagtgatttgagctttcgtgcgtctaataggtaaagaaacaaaatgttcattgaatatcaggagggtcgtgagaccatgcttatattatataaattctctctctttaacattaatgcagctatatcgtaaaaagttacggtgtagctgcaacttttttagagacttcctctgtctaatagaatagttgtaaccattgaaacagctgttgcgattgaagatgaattgaatattattgtatgtaaaaagaaaggggaaacgctgataacagcgaatcccccttttttatcgattatttccttcctttttattcagcagtcagctcaattacgcggctgaaagcctgatttgttgtgaaagcattgattcccactttcatcagataatctcctgaataagttttctcattggcagccagattcgatttggaattcggcatcaggttgatttctttcaccttatacattttcttcgcatccagtccctgaagttttaccgggagcagtttctcaccgaaacgtgggtggatatcgtaggtataaagcacagctttgttcttatccggtgaggcatacatgagagacatgtgattgccatcgtagggagaaaccaatctgtattgatcgccgtccagaatcacttttttcagacgcgtccagttggcaactgcattctggcagtaagtctgttcgtctgcattcagttccttcagtccaaggtcaaagcccagtttgcacatacttgccacatccgtacggaacttcacgcttgtgttcttgttccagctggttacgtgtgcacacatggcttttgccgggaagatttgtgagaatccccactggataaacagacgttctatcgggtctgtgttgtcgctgcaccagaattctgtgtaatatttcagagcttcgtagtcgcaacgggcgccaccgccggagcagagcatcattggcacgtttggatatttgtctttgatacgtttcaatacattgtatataccacgtacatggtcgatataaagctgtccctgtttattttttaaatatggagaataaacatttgtaattggagagttacagtcccatttaaagaaagccacttccggattctctgtcaggatcttatccactacaccatatacaaagtcctgtactttcggattgctaagatcgagtaccagctgattacggtaataatatgtttcgcggttaggcagttggatagcccagtcgggatgtttttcgaacaactcacttttagggttaaccatttccggttcaatccagataccaaatttcactccggcttctttggcagactgtacaagggcaggaataccgcccggcagtttggatctcatcacttcccagtcacccagtccggcattgtcactgttgcgtgggtgcttgttgccaaaccagccgtcatccagcaggaacatatctacaccaagatgtttagcttccttcatcagttcggcaagcagttcctcattgaatttgaagtaagtattttcccagttgtttaataaagtcatacggtcgccttgtccgtctttcagctgatagttgcgtgcccatgcgtgaaggttgcggctggcttcgcccgtaccgttgttgctgaaagtaaagatgaattcaggagttgtaaacacttcattcggcttcagttcataatcagatgcataaggattgatggcggggattacacggaggttacctacgttgtccacttcgaaagtgaactggaagtttcctgtccatccgatagtacctagcatggcacgtccctgcgcttcctgtgccggttgttcaaaaccaagctcaaagaacgggtgggtgtgcatggcagcacggcttcccagtttggtgtcgatcacctttttaccgaacaacagaggttgtgtgctcatttgtgcttcttttgcccaatcgctgctgaattctgtcaggtaatattcgtttccggagaaataaagcatggtggaagcataacgccataaggtcacaggcttcttttcagcatgtttgatttcgctccacgtcttgatgacgttttctttcggataagcgatgtaatgtagtgtgacttctaccggatactgattatcttttagttgaatgatcgtttccgttccgcccgccactgccttctgctcggaggatatatagcggagaatcgtacttgggtttccatcattgtgcgtgatagctacagccggttcaaaataatcttcggcgccggagcccggatatacttcccatcctcgggtggatacgctaccgtcacttcctccttttacgtaaggagaaaagttgttgatgtctttctcgttcagtaacttatcgcccagataagcctgatagagtcgtccgttaggagctacttggagaattaagtctgtgttgtccgttgcgatgcggataacgttcttttcctgggcgtccacttgcgccagggtaaacaatgccataagtaatacgaaaagtttcttcatggtttttttaataattaattaggtattagttagtttgtgggcatagaatgccgcaaagataattataattcgtcaggaatgaactagaatttaatgcttgcgctaaattctacggtaaatgggcgtaaataatttccactcatatagttgccggcatactgggcagcttcttctttggtaatcagttccgaaccgttgatggttccgctggcccccttctgattcaggaagttgatgactgttgcccctaaagaaagatgcttgtttacattccagttgatccccccgaaagtttcccagcgaccgttgaaatagagggcttcctggagattggcgtaagtcttgccgaaatagcggaaactaagccaaaggcgtaagtccttcgtgatattatagcttgggtcgagttcgacaagaatctgcggaatctcttttacaatcatcccattggcgttgacagacatttccgaaccatcgttgaatgtgacgcttgcgttatagttcttgtaaacaggtttctgatacgtgaacagagcgtgcaggtgaaaacctttgaacgggtcgatttcggcagatgtggtccatcccagtgttttgatattataaataagcaatacggtctttccttcttccgttcccggtttcgtcaggttttgctggtcaatattattagatttagagatataggtaaccatagaggtgaggttgatccacttgttcttgtagaacaaaccgccacggattaacggtatggtgacacgtttgtattgctcttccgtaggacctgttccggcatattcgttgatacgtgggaagcgggtggctactgttccgtcggcagtcaggccgaattgcccggttacgttgtaagtggcgcggagcgtggcggcatagttcagtttatcctttaccactttggcgggatgaatgctgcgttgtgtggcaatgatatttcctgtttcttcctctttgctataagtggtaaagtcgccgatgcggaaacccgggaaacgggaagcggatatttgatcggcactcatccggtaatattccaggcgtccgccataatagatattgaattggggagttacttgccagttgtctgtaaagtaaagggcgagtttgttctcatatccctttgtatattcgggactaagttcgttgtacccgtatgtctgtacgcgctgactggtcagagtagggtccagggaacttgtagttgtggaagtcagcaactgtggatagttctgtacggtggccatccattgcagagaagaggaataataatcaagatggtaataccattcgttcactcccagacgcagatcatggttgccaaaggtcttgtttagctcggaagtgattaggaagtttttcactttgcctacgtgcaaccaggtgcggcgaccttctgccagtccctcatacggatcaccgtttgatagcgtaaaaccatcgttggcggttacttcgctgatggtgctgcctccgaagtcgacatagttggcacgtggagcatccatatatttcagattgaatttccatagcagatcgttcctgaaacgataatcggagatcaatgcaatctcattggcacggttttcagaaccatcgcccaaattccatgttttcatctttccgtctcttacgtccatgtatgggaaagaaccgttctgcggaacataagaatttgttcccagtttgaaaccgtctatctctttaaccgagccgtcgccgacatagataaaaggagctgcattggcatagctggccggattttcactgcgggagtgtttgtagagcaaagatattttgccgcgtccgttgttgaagagacgggtcaggccggcatgataaatctctgtgcggtctgtatagttcgtaaattccaggtcgaaacttcccgggtcgaagttctggtaaatgcttgccgtgtaaagccattggtcattgatggctcctgaaacattgaagtcgaagttctgcataccgaaatgattggtgcggtagtttaatataccttggaaatccttttgtcccagtttgctgaatgagttgacggagtaagcaatattaccggtcgtgatggccgattcggaaggagataaaagtcctacttctcccaggctgctgtcgctacgccaatgagcggcaagtttgtgaacggtagaggaatatacggcaggaagtccattctcatagacattaacgtcctcgctgggaaggccgatttgaatttcgcggggtttgttggcgtcagaagcattcagcatcacattgcgttcgccttcttctgattcttttttagtagagttggcaggaatcgtatcctgcttcatttcggttcggttcgtctttttcttgttcacctgaatgttcgctgcattcccgttggaaggaatcagttgcaacagggttgctagagtaaggcaactaaaggttacttttttcatcacttgtattcatttaaagatttggaagttcacatcggttgtgtcattttgacgaaggcaaagataggaggaggagaaacaagtggctatactcttttttgtcaagatgtgcaagagatgtttcaagtgtgcgatagccctttgcagtgcgacatttattgccatccgtgcaacaaatgtttcatccttcctatgcatttagcgtaaaaaaaactatatttgtcgctatctaatatctgtgtatgaaaaggaaattgctgctttttctcctttctatttgttttttccttccggattttgccgcgacgggacagtataactttatccgtgtagatggaggaagcggtctttcgaacagtcatgtcaagtccattattcaagatagttacggttttatctggctgggtacgcgcaacggtcttaatcgttatgacggcgtgtcgatgaagctttataattgctatgacgaaactttgcagtatggcaatcaggtcatatccgctctttttgaggataatcaccgtcaattatgggtaggtacggatgatggtgtttatattcaggagcttgctaccgggaagttttcgttctttgatgcccgcacagagagcggagagcaaatcagatacaactggattgaagatattctggcagatcattcaggaaatatctgggtgaatgcaccgaatcagggagttttccgctatcaggtggagacgggtaaactgttccgctatattccctgtcccagtaaggataaaagcaaggactttccgcagtctatctgtgtagataaagaaggtacggtctgggtgggtacgtatggagcgggaatttaccgttacagtccggagcaggataagtttgtgccctatgcaacagaagcccttaaaggggatttcatctttactctgtgcgattatggcgatgaactgattgtcggagtgcatgaagaggaactgaaacggttcaataaaaagactggagaagtgagtatattccctgcgcccgaagtacatcgaaaaattatccgctacgctgtttgcttcggagacgagctgtgggtgggtacgcagaatggcgtttatgtgattaatgagaaacacaacagtgtgcaacatattcctgccgatgccggagggaagtatgggcttggagatgctatcgtcgataagatttatcgtgatcgtgaagggggaacctggatctgtacgcaatttggaggagccagctatctgcctgtacgtacgctcgatttttcggtttatcttccgggaacgcccggtacagtcagcggacgacgcatcagtgaattggcggaaggaaaagacggagtggtgtgggttagtacacaggatggcggtgtttgctactggaatccgggaacacagactttcactaaaattccccagtcgcctgaccgtcagaatgtattaagcctgttcgcttcggatgatttggttggcgcaggttactttaaagggggcattgacctgattgttcctcaagatcaggttcagacgttctatcccgcacaacttggtatcagtgaaggttccgtgtttgccctttaccgcgatcgtgggggagcaatctggttgggtgatggctggaacatcttccgttcggccgacaaaggacagacttttgagaaaatggagcaattcgggtatgcttatatgcgtgatattctcgaagataaatccggcaatatatgggtggcaacgatgggcagtggaatattccggtatcatccgcagacagatcagatggtcagctataaatgtataccgggggacagcacttctatcggaacaaatgaagtgacaggtatttcggaggatagtaaaggctttatctggttttctacagaccggggcggattgttgcgttttaaccccgaaaccggaagattccggacatacaccaaagcggacgggcttccggacaacgtaacatataaagtcgtggaagaccggcaacatcgtatctggttcggaacagaccgtgggctggtttgtctttatccggaaacagacagcctgcaagttttcaaccgaaatgacgggttacctgataaccagtttaactataaatcggccttggctgcctctgatggtactatttggatgggaactatcaatggattggtctcttttaatccacaaattgtccatccgaatacttttgtgcctccagtctatatcaccggaatgtacgtgcagggacgtgaaactcctttcacggcggatggtgtgcaactgccttaccgttctaacgtcagctttgattttgtagctttaagttatacctcaccgggtgcaaatcgctatgcctacaaaatggaagggatagataatgactggaattatacatctgatgtgcatacagcgtcttatgcccagctcccgccgggagactacctgttccgtgtgcggggcagtaataataatggtgtctggaatcaggaagaagctactttatcagtgcgtattcttccaccttggtggcgtacagtgtgggcttaccttatctatatcattgtagtgtccggcagctttgtcttgactcttcgcgcctatcgccgccgggaagtacaaaagatccgtgagcagcaattattggcagaactggcgcgtgagcgtgaatcccatcgtacgcatgagatgtttattaatcagatcacttacggagcttgtactccgcaagggggtgcgatgtcacgggctgatgaacaactgatgtcccaactgatagccaaagtgcgtgagaatctttccgacgccaattataatgtggaagcattggctgcagccatgaatatgtcccgctccagcctgcatcgtaagattaaggcgctgaccgatctttcttcactcgactttatccgtatcatccgattaaaacgtgcggcagaactattgcaggagggagaattgcgcatcaacgaaatctctgacagagtaggtttccagtcgccttcttacttcgcaaagatatttcagaagcaattcggagttactcctacagagtttgcccaacaaaataagcagagaatggcagaggattagtaactatgggctattattcgttattttatcatggggtggtgaacaggttttagctcctttcggtactggaatgaactaatcttagttcttctaagatttaattggtaatatgcgatgatttaatattcatcatatatagatttattcgtctgacagttgttgaactttcgtctggcaattgttgttctttcgtctgacaattgtcagacgaaaaagaaacagctgtcagacgaataaattcatgtatcattagccataaccccattaggtatcaaaaataaatctgcacaagctcgaaattagttcatttccgtatagaaatgagggaatgaagtaaataactacagtgtgcccattttgtttaaagagattaaaagatagaataattcagctttataaattctttcttttttacttgcttatttcatttgatttccatacttttagcctccgtaaaccctttaaaaaatgatcctatggacaacattcttttctggctggttccagtcgcttccgtgttagccctctgctttgcttattactttcataagcaaatgatgaaagagagcgaaggtacaccccaaatgataaagatagctgctgctgtgcgcaaaggagctatgtcttatctgaaacagcaatacaaaatagtaggctgggtattcttgggattggttattttgttttcaattatggcctatggctttcatgtacagaacgcatgggttcccgttgcttttcttacaggcggatttttctccgggctttccggatttttagggatgaagacggcgacttatgcgtcggctcgtaccgctaatgccgcccgtaattctctgaatgcagggttgaggattgctttccgaagcggcgcggtgatgggattagttgtagttggcctgggattgctcgatatatctttctggtatctgttgttgaatgcagtgattcctgctgatgcgctgacacctactcataaactctgtgtgattactactaccatgctgactttcggtatgggtgcttctacgcaagcactctttgcccgtgtaggtggtggtatctatacgaaggcagccgatgttggagccgacttggtaggtaaagtagaagccggaattccggaagatgaccctcgtaatcctgctactattgccgataatgtaggtgacaatgtaggtgacgtggccggtatgggagccgatttatatgaatcttactgtggctcgattctggcaacagttgcactgggtgctgctgcttttatccattcggcagatacagtgatgcaattcaaggcagttattgctccgatgttgattgcagctgttggtattatcctttctattatagggatattcgctgtccgtactaaagagaatgcgaccatgaaagacttgctcggttcattggctttcggcacaaaccttagttccgtgcttattgttgcagctacattcttaatcctgtggcttttgcaactagataactggacttggatttcttgtgccgtagtagtcggactggtagtaggtattatcatcggacgttctacggaatattatacttctcaatcttatcgtcctacccagaaactaagtgaaagcggtaagactggccctgctactgtcattatttccggtatcggtttgggtatgctttctacagctattcctgtagttgcggtagtgattggtatcattgcttcctatctgttggcttccgcaggtgatttcggtaatgtcggcatgggattgtatggtatcggtattgcagctgttggtatgctttctaccttaggtatcacattggcaacggatgcttacggtccgattgcggataatgcgggaggtaatgcggaaatgtccggcttgggtgctgaagttcgcaaacgtactgatgcgctcgattcattgggtaacacaactgccgccacgggaaaaggttttgcaatcggttccgctgcgctgacaggtctggctttgctggcttcttatattgaagaaatccgaatcggtctgacacgtcttggtaatgtggacctgacttttgcagatggaagttctatcagcgtagcaaatgccacttttatcgacttcatggattattacgaagtacacttgatgaatccgaaagtactttcgggcatgttcctcggttcaatgatggctttcctgttttgtggtttgacaatgaatgcagtagggcgtgcggcaggacacatggttgacgaagtgcgtcgccagtttcgtgatataaagggtattctgaccggagaagccgagccggattacgaacgttgtgttgaaatatcgacaaagggtgcgcagcgtgagatggttattccttccttgattgctattgttgctccgattcttacaggatttatctttggtgttcccggcgtactcggtctgctgattggtggcttgagcagtggtttcgtgttggctatctttatggctaacgccggaggtgcatgggataacgcaaagaaatatgtagaagaaggtaactttggtggaaaaggcggtgaagtgcataaagcaaccgtagtaggagatacagtaggtgatccgtttaaagatacctccggtccgagcttgaatattttgataaagcttatgagcatggtcgccattgtgatggcaggacttacggttgcttggagtttattctaaaaaagcagaagagaaataagaaaaaggagacaaaacaagtctccttttttaatttgaattacctttgtatcaaaatagaagcgataaatatgttattaccttatttgaacgagaatctgattgaggctggatgtgatgaggccggtcgtgggtgtttggcgggagcggtatatgctgctgcggttattcttccgaaggattttaagaatgaactgttgaatgactccaaacaactgaccgaaaagcaacgttatgcattgcgtgaggtaatagagaaagaagcgatagcttgggcagttggcattgtgtcaccggaagaaattgatgaaataaatatcctgcgggcttcttttctggcgatgcatcgtgcagtggatcagttgaccacccgtccccaacatttactgatcgacggtaatcgtttcactaaataccccggtgttccccatactacagtagtgaaaggagacgggaaatatctttcgatagcagcagcttcaattttagctaaaacatatcgagacgattatatgaaccgtcttcacgaagaatttccatattatgactgggaccacaataaaggttatccaactaaaaaacatcgtgccgccattgccgaacgtggcactactccttaccatcgcatgacgttcaatctgttgggagatggccagttgactttgagcttctaaagtcgctttgtttcattttacacacattttctacatttttttgcagaataagcacgattttgttacggataaccgtgaaattgttccgtttaggctaaaaaagtgttgcttagtgcttttatttgttattaaaatgctatatctttgcgaacaataataagaattaaaaagtttaaaatcatggcaacgaacaagctattatggtcttctaagctcattggggtattttttattatgttggtttgcactctttctgcaaatgcacagtttttacgtacttcctatttcatggaaggtactcactatcgtcaacaactgaatccggctttaacaccgactaaaggttacttcaatcttccggtgatcggtgctgttaatgcaacggttggttctacttcgttaggctatcaggatatcattgatattattgatgatggcgatgatttctacactaaaccagatttcatgaaccgtctgaaagataataataagctgaatgtgaacttcagtacagaaattctttctgcaggatggtataaaggaaaaaacttctggtcattcaatatcggtcttcgtacagatatcggtgctaacctgacaaagaatatgtttaccttcattgttgtcccattaaaatctaaaagagttctttgaaatatttgaaatttagttagttacagcgattttccgagcgaacggacttgaatttgtagctttgcatcagattaatccgatggcatatgttccaagacaaatacgttttcgctcaattggcttcatttctgaatcgaagtaagtttaaccgcatagtcaccaagtatgatggtgataaatatgtgaagcacttcacctgctggaatcaactacttgctttgatgtttggtcaactttctaatcgtgaaagtctgcgagatttgatagttgctcttgaagctcatcattccaaatgttatcatttaggaatgggtaaaaatgtatcaaagtcatcgctggcaagagcaaatcaagatagagactatcacatctttgaagaatatgcttactacctggttagcgaagcacgacaaaagtgtgctaatcatattttcaaacttggcggtaacgtttatgctttcgattcgactactattgacctgtgcctttcagtcttttggtgggcaaaattccgcaaaaagaaaggtggtatcaaagtgcatacattatatgatgtggaaacacagattcctgcattctttcatatcacggaagcatccgtacacgattctaaagttatgattgaaattccttatgaaccaagctcttattacatctttgaccgcggttataacaacttcaaaatactgtataaaattcatcaaattgaagcctactttgttgtcagagcaaaaaagaatctcgggtacaaatccatccaatggaaacgtaggctgcctaagaatgtgctttcagacgcaagtgtatttctgacaggattctatcctaaacaatattatccagagccacttagattggttaaatattgggatgaagaacaagaacgagaatttacattcataaccaatgcgatgcatatatctgcgcttcaagttgctgaactttataaaaatcgctggcaggtagagctgtttttcaaatggctcaagcagcaccttaaaatcaaaagattttggggaactacagagaatgctgttcgaatacagatatatgctgctatatgcgcttactgtttggtggcaatcattcaacacgatatgcaactgaacagaagtacatatgaagtgttacaaatactgagcatctcattgactgataagactcatctgagagacctctttgataaaactaaatttcaaaatgacaaagaacgattcggaccaaatgggccaagtttatttaatttttaattcgtcccaattttaatgggacactaatggtttaccttcttgaatgagatggaaactgttgaagaaaactggagaaatagtaactatgatattagtggtcagcaattgaacattaacgcttatactgaaattggtttaggactttcacgtcagattaatagccgtttgacagttggtgctagagtgaaagctttattaggtattggtaacatggagttgaaacttaatagagttgcaatgagcgctaatttacctagtgatcaacaaataaatcagtggtcaagtgagagctattggaattctatgaccccttcacaggcagcacaggcagcacaagaattaaaggataagtttaataactatcatgcaaacttgactgttggtgccgaactgaaaagttctttcaaaggcttggaattgcaagaagaagagggtaaagattatgtaactgactttgatttcgatagcggtaaattgggtatagctgggtacggttttggtatcgatttaggagcttcttataaaatattggataatctgactgtatctgcttctgttcttgacttaggctttatctcttggtcaaaatcaagtacaaagattgcatctgctaacccagatccgattgatattaaaggaagcacttatactggaatgattaatgtcaatgatccacagacagttatgaatgctgtaaatcagttgcaaactgatgctcaaggatatatggaccgtgtaacaaatggtgatgtacttgactatgacatgttgcagcttgaagtaggtgatgctaaagaatctcgtaaatctcgtcttgcttctaccctagtattaggtgcagaatatggattcttcaataacaaattagcagtaggtgtattgtcaaccactcgttttgtacagcctgatgctcttacagaattaacattctctgcaaactaccgtccgaaaagctggttcaatgtagcacttagttactcagctatccagtcagccggtaaatctttcggtctgggtctgaaattaggtcctctgtttgtcggaactgactatatgttcttaggcaagaactctaactctgtgaacggattcgttggagtttctattccgttgggcggaagaaaagcaagtaaagaaggataagatattttaatttctctctctaaacattctcttttaattaattctctatagaataaaaaacgtataatttacagcttaccgtcttagaatcctctaaaggatcacagatggtaagctgttttttgtattagaaccattttatcttccggaatatcacaaacgcaagagttgacaatccgatggaaaatagtacgatcaaagagaaagcaaagggtacctcttccagatgaatatccacattcataccatagaaactggcaatcaatgtcgggagcatcaggacgatggacagacttgtcatgcgtttcatgattgtattcacgttattggagataatggaggcaaaagcatccatcgttcccgtgagaatgtcactgtaaatattcaccgtgttaagtgcctgtttcaattcgataatcacatcttccactagttcagtgtccagataatccgtatcctggaaaatagtccttaattttcctatcattacttcatttccacggatggaagtattgaagtagaccaatgttttctgcagtctcatcagccggagcaggtcctcgttgcggatgcttcgttccagttccttttctgcggcgctgatgtctatgtttatctgctttaggtatttcaggaaccatacggcagaagaatagatgatccgaaaaatcagatccagcttgttgcgtacaacaatcccttttcgacgggtatgctctatgaaatccggtagcaaatcggtgttgtgataacagacggacacaataatctcgttattggtgattattccaatcggtacagtgtcgaagggcaggctgccgttctgcttgttctgcacagggatacgaagaatggtcaataaccagttaccttccgtatccgtacgcggacgttcgtccgtatcggctatgtcattaagaaatgattcgggtacgttgagagtttgagttagaaattcaaagtcatcattatttgggcatactacatttacccagctgttaggaagccattgagctttttccacaaagccggcttcacaataaagatacgttctcatcttattgcctcctttcgtttgttttacacgagcagaggcatcaggtttcaatgactctgttcgctttaattaatactagttgtgcacgttcgcgggtttgaatcgtccatatttctatgattttaatttaaaagcgatgcaaaggtacggaaaaatgaagagggttccgccctttgtatcgctttttttgatattcttttatttgtgccctttatttagaggctccgatcctattctgcttttccttcgaaatgattatccagatatttcctgatattgtaactgcttaaacgctctttggatatgctgccatctttttcaacaagttcatagtgtggaataccattgaactggaatagttgacgcagataattgaactctgcctccgaaacataataacaggcttctccttttagattcttctctatatattttttgtagtctttctcgggcgaatctttctgacttgtgatatagatgaattgaaactccggatgatctttatattttttgcgtaaatcggcagttgcctctattcctgcacgacaagggccacaagtcgttgcccagaaatcgacaaacagaaccttacctgaatgattctttatgatgttgcggaatacttcagtcgcttttccatcaggcaactgataagatcttgccctatctttcgggtgtgtcttttccagcactcgttcagcttctgatgcgagaaacggttcggtgaatatttgtttgatgctatccacatattcatgagctatttggctgtctttgatatttcctaaattaaaattaaggctccgcactttggctatttgccagagcaaagggttgggagtaggatataattgtgcaatgatggaatctttcttgaaatcatatttctggttcatttttataaagattttatccttatcctgctgggattcttcctttttctcggaatataatgccacatattcttgtatgagtttttgttctttttcatagagcgatgccatcttctcgttctctgcaattaactgcctcattataattttggcagtagttccggccaacttctcctgtctaagtcttattgcttcctgctccttatttagtttcacacctttttctttaaggaaagtcaatagaggtttcttcggataagtataatcaatgctgtctgatggagaaaaagactggtcggaatatgctttccggaacaggtccatatattcgaaacggttgataaatgtacttgcgtttgtgtttgcaagtacggttacatcattgagtggcatatttttcaagaaactgtaataggaatcgtcttcctttactttcagcgcctgattggtgctatcttgctttgcgtaataatctctgctcatcaagaaatcaaaaagcatacttccggcttgcaaatctaccttgttctttatcagatgaactgccttgagagagggctgatagatttggcttacagagtctgcaacctgtttccattgtgcaatgataggcttcatgtgctccttgtattggtcgggagttaatgtcttttgtgatttcgataagtcctcatagcgataggttatcaggttatcaaagtctttcagcaggtaggagagagaggcggatggacccatatatgctgtgttcctgatagggaagtaatgatcgcgtgcacggctgcgtgccattacagcttcccagtcgatatacatggtgagagtttgtccgggttcaatatagaatggaatccagttgtgtcctagtactaccgatgattctatcggatgattaatgataaatcgacagctaaaactaccgttcggggctatctggatgacggtcggataatcttcacgggtcagttcatttgacagataaataagaccggtgtcaaatcctaaacgaggatcgtatccgtttatatacccttgcagataagttgaatcctggcggaagaattgcttaaaatcaggttctgcagcaacctgtgtaatcggagttctctccttgctgtacactaattcttccgctcctttctgctgaatcttacacgtgccgtctttttgcggggtgaatgataaagtcatttcctcctgactctctctatcttttaaagtcatttcaatccgctttcccttttttcggatattttcattgatgtatatccggttattcagaatgctgatggagtcgtaaactccatattcccatgaaccggaaccgtctgtcttgaaccaattgcatttgatggtggctagtggagaagaatctttcttcttttgcaggactagcgatatgtcataaatattgccttcgggatcagtaggattgagaaaatgaatggtctgtgtttctgacggtaacggctcgaaaaccagcacataatccattgttcctgaatccggcatatagacttcttttttgagttcgataccttcagcacttttgaacagatatttcttgccggttgcggcatcttccagataggtatctccatcctccatgatccaccagtgcgggcggaagatagcatgaatatatactcttgtgttctcgggagtgcgctctatgcgggtgatgttggaaatacttcctgatcgggctttgaaaggaggatggtcgattgtttgtgcggatactatacccgataacaaaagtaagatacaaaataaagttgttttcataataatagtttttcgatcaacatattgaaagtaattttacaaagtaagaaaaatattcatagcctggtgcacttctgccctgtaacttaacatagattaaacgtttacgtaaccatcttttttgtacctttgcgcccgaaaatcagagtgataatttaaatattgaaatattatgagtaagaaagcccttttaatgatcctcgatggttggggattaggtgaccaaaagaaagatgacgtaatcttcaacactcccactccttactgggattatctgatgactacttatcctcactctcaacttcaggcaagcggtgaaaacgtaggtttgcccgacgggcagatgggtaactcggaagtaggtcacttgaatatcggtgccggacgcgtagtttatcaggatttggtaaaaatcaatcgtgcatgtgctgacaatagcatcctgaaaaatcctgaagtcgtttctgctttctcttatgcaaaagaaaacggaaagagtgttcactttatggggctgacttctaacggtggcgtacacagctcactcgttcatctcttcaaactttgcgatatcgctaaagaatataatatcgacaatacatttatccattgcttcatggatggtcgtgacactgacccgaagagtggtaaaggctttatcgaagaactttctgcacactgtgagaaatcagcaggcaagattgcttctatcatcggccgttattacgctatggaccgtgacaaacgttgggaacgtgtaaaagaagcttatgacctgcttgtaaacggcataggtgagaaagctaccgatatggttcaggctatgcaggagtcttataatgcaggtgttacagatgaattcatcaaaccgattgtgaatgccaactgcgacggaacaatcaaagaaggtgatgtagttatcttcttcaattaccgtaatgaccgtgccaaagagttgactgttgtattgactcaacaagatatgccggaagcaggtatgcacaccatcccagggctgcaatattactgtatgactccgtacgatgcttctttcaagggcgttcatatcctgttcgacaaagataatgtatctaatacattaggcgaatatcttgcttctaaaggcttgagccaacttcatatcgctgaaacagaaaagtatgcgcacgtaacattcttcttcaatggtggacgtgaaactccgtttgataaagaagatcgtatccttgttccttctcccaaagtggctacttacgacttgaagccggaaatgagtgctttcgaagtaaaagacaaattggtggctgccatcaacgagaacaaatatgatttcatcgtagtgaacttcgctaatggtgacatggtaggtcataccggtatttatgaagcaatcgagaaagctgttattgctgtagatgcttgcgtgaaagatgtaatcgaagctgccaaagcacaggattacgaagcaattatcattgccgatcatggtaatgctgaccacgctttgaacgaagacggtactccgaacactgctcactctttgaaccctgttccttgtgtttatgtaacagagaacaaaactgcgaaagtagaaaacggtcgtctggcagatgttgctccgactattctcaagattatgggtctggctgctccggctgaaatggacggaaacgttttgattaagtaatttaaatttctataattgggagggcggagtagaactccgccctttttgtctcacataaggtttaaaatgatacaaataggtgatgtagtagtgtctcttgatgtatttcaggagaagtttctttgcgatctgggtgcctgcaagggcgcttgttgcattgaaggtgatgccggtgctccggtagagctggatgaggtgatggagctggaagaggttttgccggttatctgggacgaactggcttcggaagcacgtgcggtgattgaaaagcaaggggtggtatatacggatcaggaaggtgatttggtgacttctattgtcaataataaggactgtgtgtttacttgttatgatgagaatggttgctgctattgcgcgatcgaaaaggcctatcgagagggaaagactgccttctataaaccggtgtcctgccatctttatcctatccggattggagattacggaccttataaagcggtgaattataatcgttgggacatatgcaaagcagcggttttgctgggaaaaaaagagaatcttcccgtatatcagtttttgaaagagtctttaatccgtaagttcggtgaagaatggtacaaagagctggtcactgttgccgaagaactgaaaaagcaacagtacatttaaattctcttccggttcttgcgtatgcaatatacctgatatagtaaaatacacaatgcgataataattccgcatgccggtatcatccatacttccggatgaataataatcaagaaaatacaagtggcgattacgcaggaagtcaatacaataagaaacaacctgatctttgcaaataacggattaggagcagtagttttcattttcatagttatgttttctttgctttttatgcaagatagtgattttgtatggaaaacgtttctgctgttaggttttattaagagatggacggttgatcgatttgaatatgaaagcccctttggagaaaagaaaaacgccgatcgaaggatgttccttcgccatcggcgtttcctcgttgtaagatgtgaggttggtttataaaacgtaattatttaattatgtatcgatatttgcatacgttgcattctcttcaataaactcgcggcgtggccctacatcttcacccatcaacatagagaagatataatcagcttctgcggcgttgtcaatatttacttgtttcagcatacggttttcggggtccatggttgtttcccacaattgctgggcgttcatttcacccaaacctttgtagcgctgtgtatgaattgcattttccgaaccgccaccgtaagtgtcaataaacttctggcgctgtgcatctgtccagcaatactcttctactttaccttttttgcagaggtagagcgggggagtagcgatgtacaaatagccattctggataatctgtggcatatagcggaagaagaatgtcataatcagtgtgtcgatgtgagaaccatcgacgtcggcatcggtcatgatgataatcttatgatagcgcagcttctgtatgttggcttccttgctgtcttcgtcagttccgatagttacaccgagagctgtgtagatattgcggatttcatcactttccaaagccttgtgatacatggctttttccacattcagaatcttaccgcgtaatgggaggatagcctggaacatacggttacgtccctgcttggcagtaccacctgccgaatctccctcgacaaggaataattcacattttgaaggatccttatccgaacagtcggctaatttacccggcagaccaccacccgacatcggcgatttgcgttgtaccatttcacgggcttttcttgctgcgtgacgtgcggtagccgcgagaatcaccttgtctacaatcgtttttgcttccttcggatgttcttccagataatatgccaatacttcacccactgcttggtcaacagcacccatcacttcgttgttacccaacttcgttttagtctgtccttcaaactgtggttcagctacttttacagaaataacggcagtcaaaccttcacggaagtcatctcccgagatttcaaccttcaccttttccagcatcttgctgtcttcggcgtatttcttcaacgtacgggtcagcgcacggcggaaacctgccaagtgtgtaccaccttcgatagtgttgatattgttaacgtatgagtgaacgttttcggagaatccggtattgtacatgatagccacttcaataggaattccctgtttttccgagttcagatagataacgtcgttaatcaagtgctcgcgtgaagactcgataaaacgtacaaactctctcaaaccttcttctgaataaaactgctcacccttgaagcttccgtcctcgttcacaacccgacggtccgtcagggtgatgcggagaccagcgttcagataagccaattcgcgcagacgtgaagccagaatcttgtaatcgtataccgtttctgtaaagatggtattatccggccagaattgttggcgggttccagtgatgtcggctgtaccgacttcttttacagagtaaagcggtttaccgatctcatactcctgctgatagattttaccatcgcggaatacttgcgtagtcatgtgggtagacagcgcgtttacgcaagacatacctacaccgtgcaaacctccggataccttgtaagaacccttgtcgaatttacctccggcatgcagtacggtcatggcaacttccagtgccgacttcttttctttctcgtgatagtccaccggaataccgcgtccgttgtcctgtactgtgattgaattgtcttcgttgattgttacttcgatgtggtcgcaataaccggccaatgcttcgtcgatagagttgtcaacgatttcgtataccaaatggtgaagtcccttgacgctgatgtcaccaatgtacatcgcagggcgttttcttactgcttcaagaccttccaatacctggatgctatccgcagaataagacccgttattgggagtgatttgttcttcgctcataattgcctttctaactttaataacagagcaaatatagtgaaaattgtcgacttggcgaagaataatcagtgaaaaataaagaatgcgggttgattctccgctttcttgataagtttgatattcagttggttataaacaagaaaggccgaacttaaaagttcagcctggatgctatatagaattgttaaattcttattattaagcgagcttgttgatgtaaagagccaacttagatttcagattgctagctttgtttttgtgaatgatgttcactttagccaacttatccaacatctttgtaatgcctgggtacattgcaactgcttctgctttatcagtagttgcacgaagctttctaacagcatttctcatggttttgccataatatctgttgtgaagtcttcttgtctcttcttgtctgattcttttcagtgatgatttatgatttgccatctcgactaatctattttttagttctttattcttttaacttgtagcccgtgggggaatcgaacccccctttcaagaatgaaaatcttgcgtcctaaccgatagacgaacgggccatcctttgttgcatttctgcattttgctttctcgaatctgtgtttgtttctcgattgcggatgcaaaggtaggaacttttttgaaactggcaaatgatttataggaattttttcattgaatatgtgttttttttcaaagtgaccattcttttatgctgatattcaataaaatagacggtttcagtttttataaaaaaatcttatcagtgaaaaaaaactggaaggtgttctcttccatataccttattatattatagtggaataaaaaggctgcttatttttgtgatttctcttgtaacaaaaaaagtgcattctctcctcgcttggacagaatgcactaaacacaaacaaaacaaacaattttaataaaacgatattttctttgaaaaaccgttctattaagacgctacatgtagtgggaaacattacatgagcagagggcaaaagagcccactagggtacttcgcagtagcctttgtaaatacatctcacctaaatattgttcacatactatttcgtcacacgtttttaagactccagttcggagttgttcaggcgtataatccatccgttaacttgcattcttgggcatatatgcggaattccggtatctgatggctggataaagaacaaaagcgtatatgagtcctgacggtcgagatactcctggtcactcatttcacctatatcattgtagattttggataacaacagatattgagtgagtgggagacgaagaatgttctggccgcttggtatatgtttgatcgataaggttgtctgatctcctttcatgatacgtaatgtatttaatctcgcatggatgaccggagtttgctcggacattacagccacttccttctggtatggaagatagtagactggagttgtaccgaccggtgtgtttgtgtagtctattattccgttggcagattccagagtaaaggaaaagtcctcttggcttagaggggcatttgcttcatcttgaagaatgcatgagaaataattagtatctttcactaaattggcggtaataacctgatatttttgactaatagtaatattttcaaggctactgtaaaagagtgcattcagtttcttgttcgactgattcttattatcgcatgccaatgatatattcagggaccttcgttccgtttgtccagctttgagattagggagctggtacatgtggttggatgtccctccccatataagcaaacgataagttccttcgggaaacggtactcttaccatacagtagccttgatgtaatgtaatgctgtctacgtccactcgatccacatatttatcatccttgtcgaaagcaaggatggtaatgtcgcttacttgtgtggaggcagcgtccacatctagtatattataggtatacgagattttcagccaagtcccggaagggcagtctgacaagtcgtcgttcacccagttgcaggatgagaacaaggcgatggcactgataatatagagtaaaaatggacgcatttataataaatttagttcgggtggccaatacttattcaagttctacatcttgattacgtacggcccacggaaaaacattgaaattgatgtctagttcggctttatattcatccggctgatccgggtcgatgaaaggttcgccgctaccgagtcctgcaattttgttgactgacaatctgtatatattgttgcgtacgataccgaattccataacacccatttccggagaattattatcaaggtgtttgatccagtaattgtaataacaagagtagttttccgttttcttgaaacgtttgatactatatcgagctagctcttctgttgtcgagttgtcagtgacatcgtccggcaaattattaaggactagtttacggattgcatctacgctggtataaaagttataattgaagtagaacatattagtcggccagttggactgattgctaactacatcgccattttcattgaaaacgcggtcgggggcaatatccatgttggctttgaacataactcccgtgctgtatgcattcagttgggcgtcaaggaacatacagttttccaggcagtagatatgtgaccagctgttagcttgagccatgcctgcccagttgccgtcgttgatatccaactgtactagagcttgtgcaaagaaaccgtcggcgtttgtaaagtccccggcgttctccactgttttcttgaagaaataaggatcgataacataaccattgttgtcgttgatatcaccgaagttttcatcagtatatgagtctggttcctgaaaactgttcagtactgctgtatggcggaaagtataaaactgggttgccaagttcaacattctaaaattgttcagtttgattgtacagtaggtctttccggatgggtctgttagtgggaaagtttcttgtgtttgagtcagttcaactttggcaaccacgcgttcaagaccgatggatacactagtcactttatcggagtctgtaggttttttcacttcaacgttcagattggcagctccacgattggtcataacgaaaccgttttcgggtacgcttggaatttttcctgcactgtaagttacggcatcaacagcattcagaaaagcctcttgtgtgctgatatttcctgtgattgcttttccgttagctatggcaaagatgttataagttcccggatttacagtgattttgtcggcggtgtactgtatattttgaccgctcgtaactgtccggttgatgttcttcagttcctgctgatctttgagcgtttttgtggtcgagtcaaatagataaacagtgagactctttaccgcatattcttctttagaaccttcggtggtaacgccggacgattcggcacttcgactggtagcaacgtttggaatctcgaagaacaaggcgagattgccatttgactctgaatgagtatcatcggcgatgacaacatctgcatcattgatgcaactgtactgtgtgactgctgcgaataaaagcagtgacattaatttactgaatcttttcattttacatttggttttaatgagtgtttattttagtgcacggactaattgcagattattatccgcttgtgatagtcctgctttttgagcttgtctgaataagtactctgcttcttcatagttgtttttaagaaagcatagaactccttttgctaatattgtttccggtactttcggagctttttccaaataagtggcagctgtttggacgtctctttgcatcaaggctatgcaggcggcattcaggttggctgtgggattatcgggaaatagttgtgcggcagtcatgaaaatctgattataagtttcgcttccaggtgtactggcaagtgcgagacgaaacatttcttcaagactcaaatttttagggtttgtagtaaagactttccgggattctgcaagagtaaacgggcgtacacgatactcaatagtgtagtcggaatgtctaagtagagtaaaccaatgcttcaggacaaaatcgtagaatgcagggaagtgcttttttagctttctctccttgctatcggggtgaatgtcgcttgttatggtttttattatcgcttctttctcttgaaaagtcgtatcacagagaagagcttcaaatccttcccaatcttcaggagtatagtctgtctggatatgcgctccgtcgaatgcatatagctgatttacatactctttcacagattgagtacgttcacgggccaacttctcattgagtcggtaaggtccgtcgggtgaagcgtagccgtgaatgctgatgtgtgtgatggtaacgttggtgtcatttttaatggtgttgattgtttcaataattttattcagttctactgtattgttgctgtacgtttcgtatatagcagtcacattgacaggaaaatcaataaacgcgcaccctttttcttctctgattttcgaggtttccacttggggagtcaagaatacgagttgtggaataggggttggctgtgggtgtaaacgggcgatacaagtgagattttcttcacccggaatcccacagccacagcttttctcaacgagtgagagagtggcatgattcatccaactttcgaaaggtacagattgcagataatgcattgtctgccgacttccgttttttctttgcaatgcttcggcttctttttccttcttgccggcttcgcgcaaaaatatgatgtgttgttttcggctgttgatatagatagctggtaattccaaccggtgttccaaactgtcactgacaacaggtaccaatgtcattgattcattgggcaggaagtcacgggtgatttctatttcaatagaaaccagtaattctttcccggccttgtgcaggctggaggaagtggctcgaacagtgccatcatctcctgttacaggtgtctgtgcctgaagagaaagaaataagatggctgcaatgataaaagttcctcctgttttcataattttataactaaatgacttcttatctgtaacaaaagcaatcataactcaccatggataaattcgtgagatgattccttgctgttgcaatgctttcaatatctttatgtcctttattgatctgctgatgcctccatgccctagataatatactctccatggggtagaatggcattgacgtgctattcgtatgtagatacttcttcttctggagaaccagactttccataaacttttcatcctgttttattttaaaatagataaactaaacttattgaagccttactaggccctatgtaatgataatcacctttgtctcgtaatccggcgcattccttgacgcagttgtactgcttgtagcggataaaatcgtatcctactcccagacttgtttctatattccaatgattatccagcatccagtgatatccggcactgatacctccacctgccagccatccttcatatctgtattttttcaacccggcgaatataccgaaaggcagttttttccctccgatattgaattgtgccccattgaggtaagcaccccagaaaaagccgttaaacttctggcaagtccaatatttatattctggctgtatcagccaatagcggttcacatatttctcttcccgtttccatggtcgcagactgccggtcagttcaactgtacttttatttcttatggcataggagactccggcttcgaaagccccatctattgccggaagcgcattcacgctgactgctactctctgtgagcgacagtggagccaaccaactgataagaataggaataagaataagaaatatttcattgtgtctgtttgttaaggacgtttattattttcaaaaaatacattcagattgtaagaagcttcttcggaaccttctgtcttagcagcctttaacatgcgaataccttcgtatgtgtttccagtcatcagctcatatacaccccgacaattcttgtaagcaagactgtcatgaggagccatcgataaaaacttgcttattgattgagtgtctccttgttcgatggcagcagcggcagcgtttaggttggcgatggggtgtacaggatacagtttgacactgatgttaataatttggtaaaacttagctttgttatctgcatacgacagagctacggtatagagttcgcggagcgacaacatttgtggattgacatcagccataatcttagcttcttcaagattaaaattcaactctttctggtttcgtatatctacatcatccgtagccggggaaacatacgaacctttatatttcatttttgtggttgtcatatcagctggagacgtgttttctgctgttgacgtaacctcgtccggattcttttgggaggatgggagtgcagcaggttgagatgtaatgagtaaagtatctttcaacgcttgttcaccttcaggacggatgattgttctccgaaggaggagagttgcgtggttcatccaatcttctgcgggcaacgaagttcggtaagcgatggtgcgggaatgactttcgtcgataccggcaacgaggtaggttgcgttctcttccttatgctcgcttttttttcgtaatatctggttacgcagatataatttttgtttttgtttgccgtttaataagatggaaggtagtaagatttttctttcctgtccggttaagacgggcgttagtctgacggcatttttagactccatattttctatctctaccgatacatccatggagagaagtaatgaatctgcccgcactccgagaaagtgtggagtaatatccagtttaatgttttgtgccgggagtagattgcatatcaataagctgaaaaatatgaatgctttcgttttcattttatgtggttattattaggttgatttatcggatgaaatatataattgatattcctgcttgtgtaggtccccagtagttgcagcttgatttttccaatagggctgcaccttcagactgtccgtagcgtttatagttaaggtgtgcatatccgagtgagattccagcttccagattccattgagggctgattatccattgataaccgtaggaaatgccgaaacccgccagattgccttgatatctgttgtgagcaatctgcctgttctcaatacccagcattttcccattgttgaatccccaggggagcattcctccaaaattgaacaaagcatagtgtagctgaaagccgataaaacttcctgtgaatacttcattaaaccatttacggtattctggctgcaacaggaaatgcttcatctttttgttccctccgaagttccaggggttgtaattgagggaaaggctgatggtatgcgtatcgtcacatcgcacttctcctcccatattgagagtagtggttagatcgtaaagcagattgcttttaatggctatattttgtccgcaaaggttcgaagcaggcagaatacatgcaacaaaggcaatgatggctagcccatgtttaatgtttgctgcatgtctccacctgttgctggcagcagacctttcatttttgctgatattgggtttgtgtgtcataattatttgtttatgtgtatctgttacttcttaggtaacggaactcctgtttaatgacaggaacacatgggggaaaagtaaaaaagacggtggtcttttattgatatatgtctctggaagctttcggacagaaaaaagtggtccgatgattggcaatagatagttggaacatgaactaaaagtgattcgtgttctcatatcttattttattcttcgaaagaagttgaataaaataatgtataattaatttggaatgtaatactctttttatatatctttgtgcagtatttatatccgttacctaagaagtaatggataaggcagattgctgatagatagttgtttatgtgttattgatgacttgtgttgtaagattctacgtaaaaacaattcaattgattggcttctgttcttttcttcaaaccaaaacctttcagataagtttgtgtggtttttatagatttatgtcctagtgattcactgatcatttcaatagggattccctagtatttggcatttgttgcccaagaatgccggatggtatatgaactgacaggtgattttaggtttagttctcttgacaggctttttaattgattgttgaatcggcggagggctgactgatattccttatatatgccttcttcttttcgtctcttatctcctctcattatattaaataggtagtctgggcaatcttctctcggtggattgctgttacgcagcttgtttatctctttcttggaggtgtccaggatttcaagacttattggtgtgcctgtttttatacgattgtatctaaggattccgtcttccaatgccgatttctctaaatgtgcgaaatcagagaacggcataccgcagaattggaacatcaaccgtgcgatagcttgcgtacggattaagtgttgggattgaggggctttgtagagaagtgtatgcagttcgctgaccgggagcgcctttttctgtcgtacatctacgccagtgtatacgtcacgaaacagccgggggataaagcgggctacccctgcttctacaccacgattatagatgctgcgcaacatacgcatataggtcgaaactgtgtttggcttcaacccatgttcgtggaggtactgtccgtatcgtctcaaactatcgcgagtgatctgcccgaaagttatgctgggagtaccacagaaccttgtgaatgacagaattgcattcttatacacatgtgctgtcgaataacgaccttcttcctgtaaattccggatgtatgctttggcgcatccggtaaatccgtttttattactttttcgtttcataagcttgtttatctttacttgttattcagggactataacaaaagtagttatcttttttgttgttaatgcctttaaaatctctccgattaccttgtattttttgtagctttgcttcggatttggaaatgaggttattcagttatgctgcagaaaacgaaaggaatagttcttcatacgttgaaatacaatgatacttctatcattgtagatatgtatacggagttgtccggcagagcttcttttcttgtaacagtgcctcgttcgcgaaaagcggctgtgaaatccgtacttttccagccgttatcttttatcgagttcgaggctgactatcggcctaatgcgacactttatcgtgtgaaggaagcgaaatccttttatccattttcttccataccttatgatccgtataagtcttcgatggcacttttcctgtcggagtttctttacagggctatccgggaggaggcagagaaccgtccgttgtttgcctatctgcaacattctatcatttggctggacgagtgtggagagggatttgccaattttcatctggtttttctgatgcgtctttcgcgttttctggggctttacccgaacctggaagattatcataccggcgattacttcgatttattgaatgcctgtttcacttccattcgtccccaattacattcttcttatatcaatcctgaagaggccgcccgtctccgtcagttgatgcgcatgaactatgagaccatgcatctttttggtatgagccgtgcggagcgtactcgttgcctgacgattatgaatgattattatcgtttgcatctgcctgacttcccggcattgaaatcactggaggtattgaaagaactgtttgattaattagtaacttttctccattcaactgttctagctagttttcattcttgaaacacgagtgcggtgcttttcaattctgtcgttcccttgtcgtgtcgagtccatttacttgccatatattgttttagcagtgttttatcgtccgccactgtatgcggcaattaatcaggtgataataacacttcttaatgcgggtttgtatgctgttcctgaaaatatatgttacttttgtccgtagagaacaaaagagaatgaacaagagagaaaacaatatgaaaagattcctatacctgacggtctgccttctcatcctgggggagttttatggttgtaacggagacgtatttgtcgacgacttccgtccttccgattccgaactgacgctggacgggaacggggatgttgccactattcaatttgcagctgccaattgggattggttagcaatgtatacagcttctagtcttcccgttcaatataaagtatatgatgcggacaatcgcttggtaacaaatgaccaaggtccatcgctgaacggattgggaaagattgtgtgcaccggagagatgattgatttcaccatcgaacgtgttcatcccgaagaagtgaagataacggtgggcgagaatgccctttccgctccttttcaattcctgctcacggcaagcaacgaatatgagtggcaggagatacacgtcgagatttctccgggagacagatatgtgatggatagtatcatttattctttgaatgcatattcttacgatccggaaaacaagatagagaaaaaagaaggcgtctcctttcataacttaacagatgtttcgtctacatacacgttttttcctttcgaggctttttaccattttatgaggttcaaaagcgatgtgcccgaagcttttcaactactgggcgaagccggtctgacagtggaaataccaagtatgaaagacggatatttagtgatgaacggcaaacgggcgccattcatttctgagcaacaaatgttgccttgctctagtacggaacagaacaaagacataattcctccccggacttctcgatactacaccttatcgatgatgtatgattggttggaaacgagatataccctctatgtttctcactccaaaaccaagaaacaacgaatcgtaaccggcacgttgcatagcgaaatgcctgtaaaatattatataacacacaaggatatacctttcaacaactagcatatcaatgattagaaataggaacgccatacggttgctgtgcctcttttgccttctggtatatccggcaatcaacgcaaatctggaagcccagacaatcatcggacaacggaacgacagcgtcagccattccctgatccgccatcagcttggctttgacattcgtccgggctatatcgtctccacccatagttttctgcaaggagacaatatgcagcaaaagaaaatcgaccaatcgctttctttccatctcaagtacgctttcagatttagcaaagaatccaatctcggcaggctctttcctcatacctatcagggcattggcgtttcctaccagaccttctttagtcccgttgaattgggaaatccggtgtcggtatacgcttttcaggggtcacgtatcgcgcaactgtcgccccgtctatcgctcgattacgaatggaacttcggagcttcttttggctggaggaaatatgacgaactatccaatccgcaaaacgtgttgattggctccaagatcaatgcgtacatcaatctcggctttttgctgaactggcaagttcacaagtactggaaactggcggcaggtgtagatctcacccatttttccaatggaaacacgcattatcctaatggcggtcttaatgttattggaggaagaatcggcatcgtacgcactttggacgcggatgaggcacccggttccatcactcctagacggctctttataaagcctcacgtcagctatgacttggtgatctacggagccacccgcaaaagaggactgattggagacgatgtgtcgagtatgattcctggttcgttcggtgtggtgggcatcaatttcgccccgatgtataatttcaacaactattttcgggcagggctttctgcggatgcgcaatatgatgaaagtgccaatcttaaggagtatagagtgggcgagttttactcaagcgatttgaagtttcatcgtcctcctttccgtaagcaatttgccatggggttatctcttcgggcagaactggtgatgcctgttttttctatcaatgtcggtgtcggtcggaatctgatatacagcggtggtgatatgaaagggttctaccaaattctggctctcaagacttacattacacgccatttgtttctgcatgtagggtatcagttgagcaagtttaaagaccccaacaatttgatgctggggcttggatatagatttcatgataaacgatgaaagggtaatctgtatttgtatacatttgtttcttatctatttgtttcttatgttggcgattatcccaagatttacatctttatattttaatccattaagttcaaatgtaattcctccgtcattattaactaagaaatatccatcaaaatttgtatttttactaaagttgcaatggaggtaagttgaattatcttcattaattgcataaccgtctactagaaaagccagtctatttcgatctcctactaaaacaggatatagagaaagtaacgacttttttactatatctaaattccaactctgatctttatcacaaaacagcccacattgagaagaattcaaggctgcagatattttatctgttggagtttccatggcaacaacggcatttacaatagaagattgtggccatttgtcatcataggctttgccccatactggatatgttccaatagtgtcatatatgtatttggataaaattcctgctaactcccaccattcgggtactgtgtcgtttttctccataattaatgtttcccaattaatatacactccgttaatgcttatatatggttgtaggtaagccattgcttgagcaatgcttataaccgcttctcctgtataatagttatcataccatgccgatcccggtctacttccgattccttcagcatattgtacccatgctttgggtaataaacgattgtgtggtgcactttgtgaccattgggtgctacagaaaggcacaatcatcacacttacttctcctggtatagggtcaacagggtaagaacgtgtagacaatgcgtttttatagttttggattttatccaataaagtattcttcgccatttgcatcataatattcggccctaaggagacttgataaagcgaatcattgaatgaaggcatatatgcgagtacttcttgaaatcttttatctccagaaacaataattcttccattttccagaccattatttatctctatttcataaaccaaggggagttcttcacttgataaagctcttgttttttcagaagcgtgtagtctgtatgtgctttttacatcaaatgcggtataattatctctagtttgtggttcggatgttacagattcgtgaaatgttttggcaattgcaagtgcttcactttctgacaaatcataaaggctactattagcttctatcttaatttccttgtctagttcctctgtgcatgctgaaattgatacagtaaaaatgatacatataaatatgttttttctcataatgtttttgtttacttaattattcaattgctgatagaaaacattggatttttgcacctcttacagatgcattcggatattttgatttacacttttctgtaaagtctaatacaatgataattgtatggtcgttcactacggcaaatccgtgtttagatatgctgttgttaaagtttaaggtaaggctgtctttatcccattcgtaggttccgattcttttattattgtcatagtcggatgaagaataatcaatttccacagctttagtatctttgtcaaaagagtatagtattcccgatctgcttttggcaattcctcttaattcgctctctattatttctcgaatgtgcaggtcatcaccatttatccaagtattggatgaatctcctttttctatgaactttccagaaaggtagtcggaaataactttaatctctgcataattgtcaggatattttaagtcacgcagatatatggaagtgtttcctacactgtttcctgtgatgaggattgccttactatcgttctgtggttcaactgttgctatttggggattctctgactgtaatccaagccccatttggaatttttctaaatcagacaatatatacacagttcttttctctccagccaaaatgtgtatggagttgctacttaattcaatggattcacaatttagtttgtcttcgtttgagcaactgattgtaaatatacagaatatcaaaaataatagtttcatttatctatctccttttttatcgatcaaaatgtaagccctcctaatagaattattccattatctttccaaatatgattcacttttacttctgtgatacctgcgtcaggataccgctgttgatattctgctgttttatcactctgtagaatatatccgtatgacatttttgtagcaaatttaaaaccgaatttttctgttttatcgtcatacattagggttaaagaggtaatattccattcgtatgtgccttctctgaatattcccgaatcagttttcattgtaaactttttggtttcctgattgaatgtataagtggcaccgatgaatggtttttctttttctcgtaactcaatttctatctctggggggattcttagatccactgcttttattattactcccggataatcagggttaccttttagcggaattccccaattgacaatttccggactgttgaagtatttgacatatacggagatttcacatgctatcttattattgtcagtatcgataagtcgtatcatggtgcttccacttttgtaggtagtgatgcatacgctcatttcgtcaagaatagcagtcgcaatttcttgattttctgattctaacctatagttgtgctctgttaagtctgtttctataatgacatgccatgtgtctccttcccatatagaaactgatttcttttcaacttcgtatggttcctcttcagagcaaccatacgaagatgccagtaataatacaattagtaaaactctactgattctcatagtccggttattttctagttatattatatagcatagtcatttcctgcgtgtaatatgcaatattattattatcgtcgtctggaaatacaacatcgcaatcctgcaggtcattacttgttctaaagtaaactctagatcttttcccccatcccatatttactgaccagtaatggtcatatccggcttggtgctgacgcttcgtaataacaaccccatcgattagccatgcgtgtcctcccccattacctagaatcttaccattgtcgtctacaatatgtccgggcccacaaagaaaaacaggttttctttcaaataaagattgttttgctagattgccattaaacttgttattttggttcccgtagaaattaaccatactctttaaataatttatggtattgattgtaggagtttctgtttgagtaatcactgattttttatatgtttttcctgtattgacatctaataagtccttttcttcataagaggggtgtgaatctgttgctgtggcaatctgtgcaaataatcctgtaatcatatttaccagatcttcaggtgaactagcttctggatatccttgggtaaatttgatgaattcgactgatgttgcataatcccagtcaaccttttgactattagctaaatacatgtctggtttcactatgctgaacaatattccgattgctacattggcacatcctacagcaagatgcccttcacgctcacctccatatccgtcgtagatcatcattataggcctgccgtagttgtatggatcattctgagtccatgaaactttagataaaggattgacaaaacctactacattggattgaggtctgcttacgcctccagactgatttccaggattattatttctagttgatatctcatccgttgttataattcggtctttaaagtcagaataggaaacatttttctgcgggatgtttaattgttgggctattttatgtaaagtggaatccctttttgtagatctcatacattctatttgctggatatctaaaaagacattttttttagatagttccaatagataacgtgcttccgtggcaatttcggaatgcgaagtataattgtccacatagtaaagaacttccggcactctctcgtctccacatatgacagctagacttttatttccctcattattggataattcaacctcgaatattggaactgtgggccctttggatgttgtcgagcgggtatcggctatatttttaatgatgttgttttcctcggcaacataatacttctttcttatagatatttttgttgtttcagagtttcgtgtagctattttatctccaacttctatattattttggaaattagcaacaatattgctgatttcttctatagtcagttcttgcggattgtcatacgcaatgctagcgaactcttctggagttaaaactatctggtcattttcagctttttcattatcaaacttattggcaatgttgctatctgtacatgatgaaaaaagaaaggaaatgatgaatagatatattaagtatctgttatttagcatattgtgtctatttagcataaatattatttaagtaatccatcttatgagcccattcttgaacggcatttgcctgaaaatatgtgttggcattgctgtccaattggtagaatccagtacattcatctgcccatcctaaattagcgtgccaataaacatcgtttcttttcactagttcgcgagtcgaaatggctttttctgtaaccagtataccggatatgatgaaggcgtgatcagaagttaacattagaaccaaatgcttgtctcgtaatgctgcccacgccatgtcaccattaaaagctgccttagcttggtatttaaagtatttgttcattgtctttagcatattctgttctgaaacttcactcgagataacagcattatcccagtcttttttagatgtggttttgttttcgatatagaggtctagaattaggcgctgggcatcaattatgcctcctgcgcctgggtcatctaatttaggggtctttgtcatttgatcccaattgggaatgaaagtcatacctgtttgtacttcatactttcctgtagggattagaaatgcaactggaggccttttattacagtgagtatatgtcatcatctgcgccatagcaatattcacacatccagcaggaactgatgtgaaattctttcctccatcttgtgttcttacccagtctcgtaaaccatctctatctatattagagaaccatccattataaggatcctcttgtccccaatttgtttttactagaggaaatatagatttgtcatgatagatttgcatttctatatctcctatttgtacagcagttgatctggttgtaggttctgcatcagtaatagttatatagtttttgactgcctcataagaaacctcatttataggtatttccagttctttactaatcttttcaagtgttggaagtcgtaaagagtctacagcttctttcatctttattgtattatagagatagcttgcttttgaagcatgtaatagtttactagctcctgtttgctccatcattttttcactactacatttaggaatgaaggcaatgagggcaggaaaatttgcattcgctgaaactatagcacgaccgatagaagagccattactaaattcgatttcgcaaattttcgatgtgatatcgtcattgttaatggctcttgttgcttgctcttgttttttgaattctccctctttattaataaaactctcttttacaatcttaaaggaagttgcattgcttcttgtcgttgttccgttttgcagattagcaaaggcacttaccatgttgaaaagagttttctcttccaaatcttttgtttcatcataggagatgctaaagacttcatcttgtgttagtttgactttcttttgagagataaaatcttctgaaacatcattcgtacacgaatagatggtgaataggctggctattgcacataaaaaatagaaatgttttttcatatttttaattattaagttgcgtaatgattgtatgtttgttacttttatggcattgagtgttcaatttcaaactctccaactaaagtcatgtcttcttctatataaagaagctcataatgaccggttttgtagcctgttaaattaattttataagtctcttgcccattaggggggattatcacaccttggaacatgatgtttccttgctgatcttttacttggaagatgacttgtttgtctacgttttctaaaaaacgaacttcaatagtattttcgtagagaatagcttctataggaataggaactggtactcctctgtgctgatgccatcttttgataactaaacgcttagctctatgctctgatagagtattggcttctatcgttataaatgaaatgccaattaataatagtacaatacttagctttctcatatttttaattgttttctgcaaagttatagagaaatgaaggggtgcacaagcaaaagatgtttttcggcgtggacaaaagactgttgataatcagtggcttatgcaattttgcgtggacaacttcttaaactgtagtttatttcctactaaaatgaaggtattagtgcatattctcaatcaagtactcatataatgtagtattgtcattcagcaatgcaatgttcagtttttctctaagtctaaaccgtttctttcttactgaatcacttgcaatatttagcaactttgcttctgtgttagtatcaaatccgcacatacataaacaacaatacaaaaagtcttgttctggtaagttgggacatagactatataagtatttagataaatttggatagatatatgttatttcatctgcaatgagttcccattgcttatctgttattaatggcttatcatttcttggcttattttgtttggctaaccgtaccaactctttaaatgttggtgaattttctagagacttatgttgtagttccttataattgctagttaaaagagctatttctttctctattttattatagttgtcatctttttctttaaatgtgtctaataacttttttttctcttccaattctaatgaaacataggttaaatctgtttttatccggtttaattcatcttgttgtctgtgtattttttcttttgcttgttttctatatagtaaatacactatcattattaataataagcatgaaatgcagataactgaaaatataatgtagctttgttgtttaatctttaatctaactacttcttgactgatttttaaatgattatatttagattctatgtttaatatcttagattggctgtcagcgtatacgatagaatctaccatgtcaacatattcttccaggtaggcaagcgcttctttatagtctctctctgcattatggatttgataatataaataattgatgctacacgtatattgggggtcatcttgtggaattttagataatagttctttagctttatctatagaatcagttgtggtatataagtcaatcagtgctacataatcaggcattttttcttttcccgtcgataatgctttaagaaagtacttttcggctttatcatattcttctcgcattacatagatatttcctaaagcattatttattgaagcggtaacttctatatctttagtattagctgctacggaatcggcaatagtcagtatttctatagcacatgataatgagtctatacatgcatattcacgtcctatgttttttaatgcgcaggcataactatcggtgttattttcttttttaaagcattcggcagcagtctcgtattttttgatagcttctgtgaacatgaatttttctcgatatagatcgcctatatagtcataggtatatccaatgaggttattgagcttgttttttcctgcaatgtccagcgcattagtataaatagacattgctttatcataatctccatcagcaaaataggaacgacctaaataaatcaaaatttgcacttgctcgtcagggctaccatgtgaggaataccagtcataagctctttctaattggtaagttggtaggatactattaaaaatttcgtctgtaatcttacctgataacatacaccagcgtgcaaaagctttgtcgtctagtttttcaggagatgatatactttttagtaggttggatgcgctgtcaggatttatggcaatggctttttctacttcatttagcagtctgtcagatacggattgttgtttgttgcatcctgatagcactaatatagatgttataattatagcaatactctttctcatttgtctgtcgtggtttagtttcgttgtaaaagtaatctttattttctatattatgctcttttatagggagattcttttagttcgggaaataatattagtactgtctatatcatacatcatattaatttcaaatgtgcttttattttattaagttcatgtgatctaatttgattatttcccagctattaatagactctttcttatttatagtgagaaaagttcctttctattaatacctaaattactttactataattctaaacttgtttttcattaatcgtaatctataattgcaagttgtaattatataaatgaagcttttgattttataaatgaaagctttgtttataaaaacaaaagcttcatttatagattacctttaatgtaagtaatcttttctattagtgaaaaggaagtttggcattaatagagaataagtttatatctaatagattggaatcagtctattaatcaaaattcggcagaaaggtatagtgaatcgggtgaaacctatgtgaaaggcagctcttcacccgaaatccctttattcatcgatgtttcagagtggtgaaggaggtgaacgtcatgtttaaagaaaagttgcagatgtgtgtaagataaaacatcttgcacgcatctgcaacggtatcttgcacaggtttatactgctattaatcaaatagataaactctggttagtgtagggtgcaagataaaatcaaaataataaaatcttctgtggaagtcgcagaggttatcccaaaagctctttcacttttgcagaaatggcacgtccttctgcaagacctgctagcttcttggaggcaactcccattactttacccatatctttaccgcttgtagcacctgtttcagcgataatttccttcaatgcagcttccagttcttcggcagtcatttgtttcggcaggtatttctccataacggctacctggcctaattctacgtcagccaaatcctgacgaccctgtccgatatagatttcagcagaatcttttccttgtttcacaagtttctggataatcttcagagcagcatcatctgtcaatatatcgttagctcccggggcagtcttagcttccaggaagaacttctttatatttctcaaagtttcaagggctactttgtctttcgccttcattgcggttttaatgtcttcgctgacttgatcgaataaatccatactattatagttaaaaattaaagattaaaaattagatctgaagcctgattttgcgagtttataattttcgttcttagttctttgtttagaacgtaatcacgccgttgtcatctgtagcttcttccgtggctacttcctcttccagagcggctttcgtccggattttggtaagagtagtcttatcacgcatataagtgggagaatcttctaccatggcgatgatgtcgtcgttgtccagatcttccgtattgaaaagatagatgtggcggcgtttgcggaggctcttgcttccgatattgctggcgctttcgccgtatgccttgcggatacgttctttgttcttctctttctcttcttccagttgcagttgacgttcttcctcttcctggctgcgtgcagcatgcaagctgtccattccgggaacgtcttccacaccgaatccggttgccaatacggtgatttttactcttgtttccagtgagttgtcgatggcaacaccccaaatcacttccaccccttcgcggaatttgctcatgaactcgtgtatctcgttcatttcctccatcatcagttccgacgacgggcagaaagatacgttcaacattactttcttggcattgaagatatcattgttgttgagcaacggagaatgcagggcatcgtcgattgcttttgtcacacgattttctccttcgccgaatccggtactcatgattgctactccaccatctttcaggatggttttcacatcggcaaagtcaagattgactgtaccccgcatggtaataatctcggcaatgctcttggcagcaatggaaagagtatcatcggctttgccgaaggcgttcataaaagtaaggtcggcgtatatttcgcgcaggcgttcgttgttgataaccagcaaggcatcaacatgctgggcgatacgctctacgccgtccagtgcctggataattttcttttctccttcgaagataaaggggatggtgacgatgccgacagtcagaatatccatttccttcgcaatgcgggcgatgaccggtgcagctcctgttccggttcctcctcccattccggcggtgatgaataccatcttggtgccgtcgttcagctggtttctgatatcttctatactttcttcggcggcgtcgcgtgcccgttcgggacggttgccggctccaagcccttgcgtgatgctacggcccagttgcagtttcaccgggacaggtgattcggctaatgcctggttgtccgtgttacaaagaacgaacgttacatcatggatgccttcccggtacatgtggtttacagcgttaccaccaccaccacctacaccaatcactttgatgatcttcggtgaatctgtcgggaaatcgaattgtactatctcgtccatatcttgattgaattatgaattacgaattatgaatattgattaacaagctgctgaaggttacttcatatcgtcgtcggaaaagatttctttcgtcaacgaatcgatcttgcgttgaatccaactcggacctgcttctcttttccgtctttctttctcttccttttccttttgcttgcgaagtttttccgcttctttggcggctagcttggcttcccgctcttcttcttctttcttgagacgggcgatgcgggcctgttctttcagttcctgatcgtcctcaaacatatccactgtcttatgcacttccggctccggtttggagactgatggtgcaggagcagcttgcggagcagtttccgtcaggcagcagttctggttaccttcaaacaggagcccgaacaaagtgttctgcgaaccgtctttcttcagtatgttgttgggcgcatgaaccgtattgcgtgggagtttcgccatccgtatcttttctatcttgctgcgtttgcgcaaggtttcgtccagattcttcaggttggcggcccctcctgtcaagatgattcctgccagcaatttgtcctcgtagctcgatagttgtatctggttccatacgttggcaacgatttcctcggcacgggcttcgatgatattgttaagatccgccactttgatgatacggttgtcatcatccagtttgcaggttgcttcttcctgttcggggtcctcttcatagagggcgtcaccgtaggcttttttcaggcgttcggcttcttcctcctccatttgcagggtggtgatgtcacgcgtgatgctgttgcctcccaaaggcaatacagtcaggaaacggagaatgttattcttatatacagagatggtagttgtgtctgctccgaagtcgatcagtgcacaacccgaacggcgttcgctttctgtcagtacggcatttgcggttactaacggagcgatcagttggtcggcaatatcaattttagcctgttggaaacagtgctccaagttcttacgtacggaagcacgggcaacgatattgaggaaacgtccttcgatgtggcttcctaccagacctaccggattggcttgcaggttattacctaccttatattcttgtggagctacgtccaatatatccatatcgaccaccgggatggcaatgttctcatcaccgatagcgcttacaagctcttcggatatgatagcttcttcctccaggtcgcggcttactacattgcggacggtgcggagtgattgtccgccgatgcctacatataccttggcaattgagtttttcaactcaccttccagtctgttgatgattgaagtcaggctttgcgctgtcttgtccaggttaaagatcactcctttacgaatgaacgtagaagagtcttcctgggcatacgctaatacctgcatgcttccgtcactgttcttttttccggccacaccggttatcttcgatgaaccaagttcaatagcggcgataaattctgttgttgccatagggttattttatttactattttactatttacaatttactatatagagagactgtttacttatcatctatcacttatcaactactctcgttttgtacagataatctggttgctgaattcgagattgatacgtgaatatttgttccagcctacccggttgagtccttttttgtagaactccttcaaacgtgccagtttatcttcaaagttctccagttttccgagatagaccagatggtctcccacacgcggcaccaattcgatgttctggtcgggcaacacatggatctgctctatctgggcgtcccagaatttattattatgcaaaaatacaccaaacttatataaatccttcattgcaaacgacttttctacgtttccggtgacaattacccggtgagcgacgcattttgcttccggtggcatgacggttcctttgttgtcaaggtagtagttttggccgttggcgctcatgacccggaggataggaatacgctgtgtcacttccacgcacactttgccgctgggtgttttgtagcattcggcttcgtcaatcaacggatgtttgcttagttcccgttccagtgacttggtggagatgcgttccattttcttcccgatggggtagatccctttctgctgaaggatacctttcagctcttctttggtgatgaagccggcgtatgcggtatccttgataaccaattccatgtcacggcaggtctggtcggcaggcttgcggttgaatgcggtgatagctacggtgaggtaggctataagcaccagcatgacgatggatagaaggattcttttaatcataatcaaaaattaaagattaaaaattaaaaagcttgcactgtttcggacaggctgccggatgattattcatttatcttttttctaatagttcctttatttcggggacatagttgtcgatgtctccggctcccaaagtaattaatacttcaatgtttttatctttcagaatgttcagtatctcttcctttttgcacatacttttttcgatacccggacggagattatcataaatcagtttgctggtaacgcccggaattggtgcttcacgtgccgggtagatgtctaccagaatcacttcgtcgagtagcgacaggctatcggcaaaatcctgatagaagtcgcgggtgcgggtatagagatgaggctggaagatggctgtgatcttcttgtccttgtaaagttcgcgcatagacaacacgctctgtttgatttcagaggggtggtgtgcgtagtcacttagaaagacaatccggtcgttcttgagtttgaagtcgaaccggcggtctactcctcggaaacttgccatacctcttttaatttcttcatcggtcaccccgttgaggtgtgccaatgccatggcggctacgccgttctctatgttgatgcttaccggaattcccagttggatgtcgttgatacgggtgtccggagcaacaaagtcgatgaatatctccccgtttccgatacggatgttttctgcatggaagtcgccttcgtcacgtgagtaagtgtagacacgaacgtccggctgcactttgggttgcagagagatgcctttacggataatcagtgcgccacccggttggattagcgtggtgtaatgttcgaaactttccaggtaggcttgctctgttccgtagatgtccagatgatcggggtcggtagacgtgattacggtcatatagggtgacagccagtggaaagaacggtcgaattcatccgcttcaatcacagtgtaagggcttgcttgagagagtagcaggttggtgccgtagttctttgagattcctccgagaaaagcggtacattccacgtgcgactggtggaacagatgagctgtcatcgtcgatgtggttgttttcccgtgagtacctgctacgcacagacctttgctcgaatgggtaatcgttcccaatacttgggcgcgtttctgtatttcgaatccgttgttgcggaaataaacgagttcttcgtgttcctgcggaacggccggagtgtatatgactaacgtactttccttgtctttgcaggcttcgggaatcaggtcgacgttttcttcataatgtatttgtgcgccttcggagattagcgtttcagtcaatggagtaggagtacggtcatatcctgccactacctttcctttgaaaaggaagtagcgtacaagtgcgctcatgccgatgccgccggcacctacgaaatagactgattttatcgtttctatattcatttcttctgtctttttattttagtgcagattacgttgtttgatacgggcattgtgccgttacttcaatctgcgtaatccgatcgtccatttatctgttctttgcttccgccagcttaatgacctcttgtgcgatgattctcgctgaatcgggtaaagccagtttggcgatattctctgttagttctttcagtttctgctcgtcgttgacagtggacagggctacgtccatcaaagtggtttccgcttcactgtctttgacgtagatagctgcctgtttgttcaccaacgctaaggcgttcttcgtctggtgatcttctgccacgttgggcgagggcactaagataacaggtttgtgcagcaggcagaattcagaaatggaacctgctcccgcacgggagataaccagatcggctgctgcataagcggctgccatatctttgatgaaatccgttacatataaattcggaagtgctcctgccgcttttacggcttctgttacttgcgggtaatagtatttgcccgtttgccagataaattgcacgtccgtgttttccttgatggttgtcagactggctgtcagcgtgttgttgatggtgcgtgcacccaagctgccacctacaatcaggattgtctttttgccgggctgtaagtggaaagaacctagcgcttcttcttttgacggcatatcctttgtcaggttctggcggacgggattacccgtcatgatgatcttgtcggcggggaagaacttttccattccgtcataagctacacaaatcttacgagctttctgtgccaggagtttattagttactccggcatacgagttttgctcctggattaatgtggggactcccatcattccggcagtctttagtgttggcccgcttgcatatccgcctacacctaccgccacttgcgggcggaagtttttgattactttgcgcgctttccattggctgcgcatcagtttaatcaatacggatacatttttccataaatgtttgcggtcgaatccggctatcggaagtccgataatccggtagcctgcatcgggaacccgttgcatttccatacgtccttcagcgcctacaaagagaatttctgcgtcggggcgtagctctattatagcgtttgcgatagagacggcaggaaagatatgtcctcctgttcctccaccgctgatgataattctaagttctttttccatcattctgttttcttctgtcctttctcaacatttaccgttcattgtttctgctatcatgctcatcttcaaatttggcgtcgctgttcagaatctgtgctgtcggttcggctgcggcctgtgcttccgaattggctgcggcatccgcctctatttgcagttggatctgtgcatcgtgcgctttctgttcttccaggtgagcggtatatcggcttacgcttaatatcattccgatataagcgcagttgattaacgtacttgtacctcctttgctgaccagaggcaggggttgtccggtgacggggaataacccgacggcaaccatcatattcagtattgcctgtgataccaacaacagcgcaatacccatgacgagaaaggcggggaaggttcgctcgcacttttgggcgattcgtccggctcgcatcagcaaccataaatagaggaacaccacaaatattcctcctaccagtcccatttcttcaatcacaatcgcgaagataaaatcggagaatgcctggctaaggaagtcgcgttgtatcgagtttcccggacctttgcctactacatggctggtagcaatagcgattcgtgcgtgtgcaatctgtgcgtctttgtcaatatcaaatttggctgccggcacttcttctttctcaaagaaaccggaaacacgattctgccacgtttcgaaacggtgaagtcccggagtgttgtgcagtgttttggcgggaatagccatcagtatgcctacggcaacaccgcctacaagccccaatatccccaacatcccgaacagtttcttggaagatacccgtccgatgaacatcatcatacataccactccgaacagcagcattgctgtcgaaaggttttccggtgcgatgagcaggaataccagtccggtgaggatcatgatatatttaaaggcattcggattggccccatattcgtcctgccttttggacaggatgaatgagacggcaatgattaccgccatctttgccaattccgatggctggaattgcaatcccataaaggtcatccaacgggcggccccgttgacacggtcgcctgtgataatgcccatcagcgtgacaaatgccagtagaaccagagataccggatatagaaagaccggaaatacctggaaccatttgtagggaacattatgcagaaatacgactactacagctcccaccatcaggatgatggagtgttgcgtaatcggcccccaatggtcgccacttttgtaagtcagcgtcgacgctgccgaaaacacctcgatgatcgagatgaggcagagacagaggaagataatccagattaccttgtcacctttgaatatgttctttaataaatccaatcttgcagaatttaaaaattaataattagaaattaaagggcacggacacattctttaaattggtcgccacggtcttcgtaactcttgaagaggtcgaaagaagcgcagcaaggacttaataataccgtttcacctttctttgccagtttataggctgcttctacggcatctttcattccggtttgcacatcggctaccggcagaccgaaacggtcgaagaattcgtgaagcttttcgttatgaagtcccagatataccagtgctgaacatttttcgcgtaccaggtcttcaatttcagtatagtcgtttcctttatctttaccaccgagaatcaataccgttttggtagtcatgctttgcagggcataccagcaggagttgacattcgtggctttagagtcgttaataaaatcaattccgcgcacacgtgccaccttttccaaccgatgttccactcccttgaaatcggagagggccttgcggatgttttctttggcaatgccggcaaggtttgccgagataccggcggctaaagagttgtacaggttgtgttgtcctgtcagggccagttcctcttgctccatgttgaaggcaatcggttcggtgattttcacttcgtgatcttctacgtatgcaatcgctccatcctcttttacagcggcaaaaggatacaagtgagctttcagaccatgttttgccagttcctgtctgatgatagggtcatcgttccagaagatgaaagcatcgtccggtgtttggttttgggtgatgcggaatttagcgtcgatgtaattctgcatacaatggtcgtagcgatcaagatggtccggagtgatgttcatcaatacggcgatgttcgcacggaagttatacatattatccagctggaaagagctaagttcgataatatagtaatcgtggtaatcttcggctacctgcaaagcaaggcttttgccgatgttgcctgccaaacctacgttcagacctgcgcttttgaaaatatggtagatcagggaagtcgttgtggtcttcccgttagaacctgtaatacagatcattttggcatcagtatagcgtccggcaaactctatctcggagatcaccggtgtgccttgagctttcagtttcaggatgatcggggcatcattcgggataccggggcttttgattacctcgtcggcattcagaatgagttcttcggtatggtgtccttcttcccaggcaatctgatggctgtcgagaagttccttatacttgtccttgatagcggacatgtccgaaacaaacgtctcaaatcctttgactttagcgagtacggctgcacctgcgccgctttcgccagctcctaaaattactattcttttcatctacaataatgtgcccttattttctaattgattgatttatctattagctgtgcacatctttaaaagttaataatcgggttaatactctctatctataaaacttgtttcccgtatggaaacttggctccggcaccttgccggttatcttattttaagcgttataatcgttattgctgccaatacaatcgttacaatccagaaccggacggtaatctttgattcatgaaacagttggtcgggtttggtgaatttcaccgtgcatcccggttcaatcaggctcatcgaagtgcggaagtgatcgtgaatcggtgtacgcttgaacaatcgctgtttcacaccttttcgttttcccgccttataataagcccgttgcaggattaccgacaggttttctaccaggaatacaccgcaaagaatcggtatcagcaactctttgtggatgatgatggcaaacactgcgataataccgccaatagtaagactgcctgtatctcccataaatacttgtgccggataggcgttgtaccataagaaacctatcagtgcaccgataaaggcgcagatatagattacgagttcttccgagcccggaatatacatgatgttcaggtagcctgcaaattcgatatgcgatgatacataggccagtacccccaacgttgcaccgataattgccgagttcccggctgccattccgtccataccgtcattcagattggcgccgtttgatacggcggtaaccacaatgattgtgacaatgacgaacaatatccatccggctgtttgcgcatgttctcccatgaacgaaaccagatcggcataatcaaggttgttgctcttgaaaaaaggaatcgttgtctgggtagatttcaggtcattcgttccgtgtatcacttccatctcccttcccggattatgcacttcgatattttcacggatcactacgtccggacttaggtacaaagtcatgccgacaattaaacctaaaccaacctgcccgatgattttgaatttaccatgcaaaccttccttgtctcttttgaagattttgatatagtcgtctgcgaatccgagcgatcccaaccatacggtagtgatcagcatcagtatcatgtatatgttatgcagtttacctaacaataaacaagggatcaggatggctacaatgatgatgacacctcccatgctcggcacgcctactttattgacgccaaacgggtcggttttagcatcacgctgcgtttctgtgatttgtttccttttgagtaggttgatgaacttatctccccagatacttgaaataagtaatgcgaggataaccgccatcaaagcacggaatgaagtatatccgaacattcccgctcctggaaaattgagcttatgtagccattcaaatagatagtataacataaataatttgccaatttattgatgtgttgttatgccggttgctgtcggatagataacgaagccggtcggcatattagcacagtctattcattatttaaaaatttctttaagtacttctttgtcatcaaaatgatgtttcactccttttatctcctggtaattctcatgtccttttccggcaacgagaattacatctcctttctccgccagcatgcaagccgtgcgaatcgcttctttacggtcggcaatacttagtgttttcttcatatcttccgcatccagtccggcaagcatgtcattgatgatgtcttgcggctcttcaaagcgcggattgtcggaagtgatgatgacgcggtcactcgctttggcagcttcctttgccatgatggggcgtttgcccttgtcgcggttaccgccggcgcctaccacggtaatcacttttccttttccttcaagcactccatgaatagcgttcagtacattaatgagagcatccggggtatgtgcataatcaacaatcgccgtaattccctgcggtgagcggaccgcatcgaagcgtccggctaccggatgaagtgtgctaagagctacaagcacctcttcctctttcttgcctaacagaactgccgccccgaataccgccaataaattggaagcattgaactttccgataaactgaactgccagttcatgattgttgaagtcgagcagcatcccttcgaaatgagactctaatacccgtcctttaaagtcgctaagacttctcaatgaataagtatagaccttcgaacgtgtattctgcgtcattaccagtccgtttttatcgtccagattggtcaggctgaatgcatttttcggcagatcgtcaaagaatttcttcttcgctttcagatagttctctattgttttatgatagtcgagatggtcgcgggtcaaattggtaaagatccctcctgcaaactttaatccactgatacgtttctgtgcaatcgagtgggagctgacttccatgaacacatatttgcatccttcatctgccatccgtcccaacaaacagttcaacgtgattggatcaggagtagtatgttctgtcggaatcggttcatcatcgatgtaattgcaaacggtagaaatcaatcccaccttatagccgaaataacggaatgtattatataataaggtagcgatcgttgtttttccgttcgttccggtaacgccgaccagttccaacttggaagtcgggtctccgtagaaggtagtggcaatttttcctaccgcatcttcgctgtcttttactcgtacataggtgatccccgctacaggttcttccggcatatcctcgcaaaggatggcgattgctccttttgcgatggcagcaggtatataagcatggccgtcggcttgtgtgccacgcattgccatgaatagctgtccggcttccactagacgggagtctatgttgacaccggtgatttctatgtttgaatctccggctacctctaccggttggattgctttcagtaactcatttaataacatcactctattcaatttttaatctttaatttttaattaagcgtaagcgtcactgtctgtcccttcttaacaatcgttccgttggctatcgactggctttttactttgcctacgccgaccagattgactttcaatcctttgctttccaacaagtacacagcgtctttcgctcccatacctatcacactcggtacaaaattctgcatattgctccggctctcaagaaccacagcttgtggggcagaatgggtatttccccaaacctctttgcccgaatcagcgattttgccttgtacgttaatctgcagctcttccaatactcgttgcgcttcgcgcatctctccggcttttacattcggaatgactacggaattagtatcaatcgcattggtcagcggtaaccgcaagtctttggcatacaccctttctgcaatcttgctgaacacactacctgccattaaacctcccgaagccggtaatcccggtttctggatagagacaatcatgctatatttaggtgcttctgacgggaaatacccgcagaaactaaccagataatttgttcttcccgttttgtatccggctgctccctgtgaaatctgcgccgttcctgtttttcctgaaacgtggaactgcttgcttcccgcaggtttggcaagtccttcaccaaccacttttcggagaatctcacggatctgtgccaaagtcttatccgaacaaatcttgggattgattacctctgtcggatattctttcactacttccccgtccttcatggcagctttgacaaacttcggacgcacggtgactccgttgttggctatcccattatagaatgtgagaatattgatcggtggaacctgtgtctcgtagccgatactcatccacggcaatgttgtctttgcaaaataacgttctttcgggccgcgtatattcggttttccttctcccgcaatctgcaggtgtaacggctggtcgatgctcatccgtttcaacccgtctacaaatttctgcgggttgctgccgtagaaatggtctataatataagaggtacccacattggacgaaacccctagaatttccgtaacagtcagctttccatatcctccgcgatgccagttatggtctttcatgacacgtccatacatcggcatctggccgttgccggtatctaccacatagtccggcgtgatctttccgtcttcaagagctaccatgatagaggccgttttgaaagtagaccccggctcgagcatatcactaatagcattgttgcgcatttcgtagtactcaccgtctttgccttgcatcatgttgacgatggctttcacttctccggtacttacctccatcaataccaccacacccacgctcgcattcagctctttcagcttatccaccaacgccttctcgcaaatatcctgcatacctacatcgatagtactaatcagatcgcaaccatcaactggtggcacatcgacaatgttcaggtatttgttcatcaccttctgacggtgtgtcaatccgtcccgccctttcaggatggtgtcgaaagcaagttcgataccatttctcgctcctttggctgtgtctgcatacacatctcccagtgtacgggcagccagtgaaccgaacggtttcttacgctgattgtaagcttgttccttgaatccgcctttataccggttcaagcagaatacaggcagtctctttacctctttatattgtatataggagatacgtttcggataaatcagataattgcggctttttgcctggcgtcctttcttgaggtgtgccttgaattgagccgcactcttgtccgggaatatcttgtgaagtccgatacagattgaatccatattggcattgaggatggaatcccggcgtgcctgatctttctgcctgcgtttttcatccttttcaccggacataaagtccatatatattctgtactcgggcagagagctggccatcagtttaccgtcagaagaaataatgtttccacgattaggttttaccgtcacattctcttttacgaaacggtcagccacatcctgccagtattgtcgttcggcaaacatggtgatgcctgcttttacaacaatagctactcctatcaacgccatcaataggatgacgaagaagtaacgggtcattatgttctttttattaactgccacagtatttgtcttttaaacgcttaactatcatttatcaactatccactatcatctatttaataaggtaaggaggattggttgatgtttgcaaatcgctttccttactcgatatataatcttcaatgcgtgactggcggctcttttccatcagctctgagctgcgagtcagtgcatcgtatttaatgtctgtcaattcctttttcagccggtctatttcgatctgttgctgttgactggcataacgattgtgaatgtagaagatgatgaataccatgataagtaccagcaacttcgtttgacggcggaaaaaatcggtagccagaatgtctccacccagaatactcttcagagaggtgcgttttttcttcttgtcctcttctgctttcttgtttactacttcttcttccatatctttttatttcttttctgcaattcgtaatttggcgcttctcgaccgcgggtttcgttctatttctgcctcgtcgggaacgattaccttattgttgacaaggcggaaaggcgtttgcagattgccgaagaagtcggtttccgcttttccttctacattgcctgtcttcatgatgtttttcaccattcggtcttccagcgaatgataggtgataactaccagtctgccgcccggctttaatgcctccgtagcagccagcaacatctccttcaacgcctccatctcttggtttacttcaattcgtagtgcctggaacacctttgccagctctttcttttcgcgttcacgaccgaaaagcggtttgatgatttccaaaaactcaccgatggtccggatattctgtccgcttctggctttaacgatgacagaagccagtttgcggctattctttagttccccgtacaggtagaggatgtttgcaagacgttcttcatcataagtattcacgatatctgctgctgtcataccggcacgcttgttcatacgcatatccagtgccccgtcaaaacggaaggagaagccacgttcgctatcatcgaaatgatgggaagatacgccgaggtcggccaggatcgcgtctacctgttcgatgtcgtgataacgcaggaagttgtgcagatagcggaagttactgcgcacgaagatgaaatgagtatcgttgacaatgttccgttcagcgtcctcgtcctggtcgaatcctagcaaacgtccgccttctccgagccgtgaaaggatctcgcgcgaatgtcccgctcctccgaatgtaacgtctacatacgttccatccggttggatattcataccgtcaacgctttctttcagcaatacaggtacgtgatatgtcaattcatctttctccatcttgtctattatcatcgttcataatttcttctaatgctgcaccgaactcttcgggtgacatgaaaggctgttctgcccgttctttcgcccagatctctatcttgttatcgatgccgataaagcgaatatccccatggatactgcaaatctgtaaataccgtttcggaattaatatgcgcccgttgctatcaggtgtcactatttcaacgtcgctcacgaattgcctgaaaataagttggtgtttgctattccatttgttaagtctactacgtagctcgttcaactcctcgttccacacgctctcggggtatagggttaaacagtcttgaaatacgtctttacgcataataagcctctcttcggaagcggcttgtaattgcttcctgaaggtggcgggtatgaacacccttcctttggcgtccgccctggcttcaatatttcctaaaaaacgtatcattaccttattataataagcgaccgtaaaagtatgaaattccccacaattccccacaactttccataaaaaactttcagagaagttttcaacagaatgttaaatgtctatttgcttgaaaatgatatgccttcgagaatgctttactggtggggagcccgtgggcgtagaacggaaaaaatgtctgtataggtaaaatttaaataatgtggtgggagagattctttttcatgcaatagaggtttatctgacacccgggtctcagtgcacccgacacccgggtgtcagataggttgagacccgggtgttgtatgtgctgacacccgggtgtcggacaactaatcttcgcaataaaagaaaaggcagaatataccggagtatttctgccttttaatcattatcaaaactaaaaatctgcattaaagaaatatgtgattcaaaatcactaagttttatatagttaaggtttagcggaagtctttcaactcttcctgtaatttctggcgcgtgaagaaaatacggcttttcactgtacccaacgggaggttcagtttttccgcaatttcacggtatttgaatcctgaaacgtgcatcgcaaacggaactctgtattctttggggagtttgttaactacacggtgcatctctttcaggtcgtatgctctttctgtattttcagaacttccatcctgtggcaaattcagatgataaagattatcagtctggtcgatgaatgtctggtcgcggactaccttgcggtagttgtttatgaatatattgcgcatgatggtatacatccatcctttgaaatttgtatcaggggtatatttatcttcattatctaatgcttttaatgatgtctcctgcaacaaatcgtttgcttcttcacggtcagttgtcagtttataagcgaagcgtagtaattcatcttgtactcctactaagtcttttctgaagcttaaacttttcataatgtgttgctttttaaaggtgaatattcgtttgttattgttgcaagtttacatgaatttttgaaacccagtaggggaaaaactgacgtttttttacccgaaaactatccgcggatagtttttaggtcatttttgatagtttttgggtggtgtttttttatgttctgaacttaaatcctgcattttctaccaaattattgcgattaataaaaaagaaccgttaattttgtgccatcatttttatttgaaaagaatgactgatgactctttatttttgattgatgtcgataagatacttcggacaaaggctccgaagcattataagtacatccctaaattcgtggtttcttatctgaagaaaattgttcatcaggatgaaattaatgtattcctgaatgagtcgaaggatagattgggtgtggactttctggaggcatgtatgggctttttggatgcgaaagtggacataaaaggcattgagaatttgcctaaggatggattgtatacttttgtgtccaatcatccgttaggtggacaggatggtgttgcgcttggttatgtgttaggaaagcactatgaggggaaggtgaaatacctggtgaatgatctattgatgaatctacgcgggttggctcccctttgcatacctattaataaaaccggcaagcaggcaaaggactttccgaagatggtggaagccggattccagtccgacgatcagctgattatgtttcctgccggactgtgctcgcgccgtcagaatggagtgattcgcgacctggaatggaaaaagacatttgtagtaaagagcatacaagcaaaacgtgatgtaatacccgtgcattttgggggcaggaattctgacttcttttacaatctggcaaatgtttgcaaggcactgggcattaagtttaacattgctatgttgtatcttgcggatgaaatgtttaagaatcgccacaaaacttttactgtcacttttggcaaacctataccctggcagacttttgataaatcgaaaactcctgcgcagtgggctgaatacgtaaaggatattgtttataaactgtaactgatagaacaactataacaaggaatatggaagagattattaaaccggtaagcaaagaactgctaaaggcagaattgacggaagacagacgcttacgaatgacgaataagagtaataatcagatttatattattactcatcagaatgctcctaatgtgatgagagagattggtcgtttgcgtgaaatagctttccgtgctgctggtggaggtacaggtctgtcaatggatattgatgaatacgacacgatggagcacccctacaagcagttgatcgtatggaatccggaagcggaagaaattctgggcggttatcggtatctgcttggtacggacgtgcgttttgatgaaaaaggcgcgccaattctggctacttcccacatgtttcatttttctgatgcttttattaaagaatacctgccgcagacaattgagctggggcgttcgtttgttacgcttgaatatcagtctacccgtgccggaagcaaaggattgttcgctttggataatctgtgggatgggttgggagcgttgaccgtggttatgccgaatgtgaagtatttctttggcaaggtgaccatgtatcctagctaccatcgtcgtggccgtgatatgattcttcatttcctcaagaaacatttttatgaccaagagaagcttgttactccgattgaacctctgcaacttgagacttccgaagaagagttgaacgcattgttctgcaagaatacttttaaagaggactataagatattgaattgtgaaatccgtaagttgggctataatattcctccgttggtaaatgcgtatatgagcttaagccctacgatgcgtatgttcggaacagctgtcaattacgagttcggtgatgtggaagaaaccggtatcctgattgctgtagacgaaattcttgaagataaacgaattcgacacatccagacgtttattgaaagccatccggatgcgttgagattgtcttcttgtgaaggggaagaagtgtttactcctaaagtggttacaccgcaggcagactgttcccgttaattttacgataaagatcaagagcaaagacgtcggtcattcccgatatatagtcaagtaccgcctgtattctttcatagagtacgggcgcttttatattgtattgactggaaacccggtcgatcaggagtttggaataagtcttttcgggtgaggttacggcatctatcatcaattcgagcagggtgctgatgatgcggaatcccgccagttcaacatccagtacgtcccgtgaacggtagattttattgatagatacttcgacgctgtgtttataggctgctgccggacgctcggctatgcgcttgattagtgatccttcgaacgtgccggacagtatttcttgttcatgatctaaaaagacacgggtacactcccggatcaataaaccgatgacggaagaacgcaggtaggcgatttgctcgttgacatcattgacaatcaggaatgttttccggagatgttcttgtcgctcttcgctgaaataggtcattaatagttctttggtttcttcagtggtgagaatcttcagtttatatgcatcctcaatatccatcatctgatagcaaatatcgtctgccgcttccactaaatagactagtgggtggcgtgcatacttcaaaggatgctcgttgagcaaggtcagtcctaattcagttgctattttttggaaactttcttcttcgctgacgaagaatccaaacttcgatttggttcttgcaaggctcgatgaaaagggatattttacgatagaagccagagtggtgtatgtcaggacgaatccgcctttgcgacgtccttcaaactgatgtgtcagtattcggaacgcatttgcatttccttcaaaatgtgtcaaatcttcccattccatcggagacagttgctcgccgttcggctgcttttctttcagacgaactccttttccttcagagaaaaaggtagaaatagccttttcacctgaatgaccgaagggcggattacccaaatcgtgtgccaggcaagcggccgagacgatagaaccaatctccggcagaaaagaatcttgaagttccggatgacgttccagaagtgctttggcaacatcgtccccgagtgaacggccaacgctggctacttcgagactgtgcgtaagtcggttatgtacaaaaacgctgcccggaagagggaatacttgcgtcttgttctgtaatctgcggaaaggagccgaaaaaatgagacggtcatagtcccgttggaattcggatcggttttcctgtcgttcttcgtggaattcttccatcccgaaacgtttcgctgatattagttgtttccaattcatcattttatttacgatttaacgatttgcgatttgatgattgatgaatgtgtcaattgacagttggtacattagcaccttgccttattagcacattatttattatttaactgcaaacttaactatttttcagttcaaaatgtgtattttcgcttgttaaatctgctgtccgagatatttgtcgttaaagataaaatagattcggggttttgactgaatcggcggtagacttgatctggattaatctttttacttcttatttatatgaaaaaacaggttacagcctttatctgtataatcgttttcaattttgaagccatattcgcttctactgatttctcttttaaaaggtatcaggtggaagacggactttcgcacaatacgacttggtgttcgattcaagatagctatggctttttgtggattggcacaagtgatggactgaattgttatgatggttgtggcaacagggtgtatcggaatgctttgaataataaatattctttgggtaataatttcgtcagttcccttttggaagaaggggaaaatatctgggtaggaacaaattcgggactttatatctatgaccgttctactgaccgcttttcttattttaatgaaacaacacggtatggcgtatttgtcagtagtgaggtgaagaaaatcataaaaactcaaagcggtttgatttggattgctacgttggggcaaggtgtgtttatttatgaaccagtgacaggtgtgctgacacagaatagtattcatacttcttttgtttgggatatctgtcagagtgcagattcccgtatttatgtttcttcaatgcaggaaggactattttgttttgatgagaagggaacctttctgcaaaattatccggttctgtcagattcaaacataggcagtcaaagaatcaattgtctctatagtattaagaatgaaatatggtttggcgtaggtactaatttattaggttgttatcaggaaggaagcccggatttgaaaatttatgatgcgtctgcacagaatttcggtgctattctctgtttgatggattataacgaaaaagaattgttagttggtacggataatggactgtatctgttcaatcgcgaccttaaaacatttcgtagaggcgattctccctttggcttgcgggcattgggcgatccaactgttaatgcaatgatgtgggatgccgaaggtacactttgggtgatgactaactccggcggagtgagttacatgactaagcaattgaagcgttttgattactattcccttatctcattatcaggtacattagagcttggcagggagatcggccctctttgtgaagaccagaatggaaatatctgggtgggaacccggaacgggttatgttttttcaatacacaaattcattcactttcggagtatactttaaagaatgtggatgcgagatatgacattcgtagcttgctgctagatggcgaccgcctttggataggaacctatgcggaagggttgcatgtgctaaacctgaaaactggagcagtaaagagttatgtccattctcgcgatattccctatacaatttgtagtaatgatgtcttgagtctctttaaagaccgaaaaggagatgtttttgttggaacaagttgggggttatgtcgttacaattcgcaattggataattttgtgacaatcattcatgtcggctctatggcttctgtaactgatatttatgaggatatgtacaatagtctttgggttgcgacctcaaatagtggtgtctttcgttataatacagtgaacgatcgttgggaacattttgaacatatacgtgaagatacaacaactattaccagtaattctgtgattacattgtttgaagatatgaaaggaacaatgtggtttggaaccaatggaggaggattatgctcattctccaaagatacggagactttcattgacttcgacccggaaaatacattgttgcctaataaggtaattttctctatagaacaggatcggaccggtgatttttggatttcctgtaatgccggattatgccgcattaatcccgtgtctcaaaagaactttcatttatttaccgtaaatgatggtttgcaaggtaatcagtttaccgcacagtcttcattgagatcgtccacagggaagttctattttggaggaatcaatggtttcaatgtatttgaaccggggcagtttacggataatacctatcttccccctgtttatgttactgatattagtttcccttatttgacagatgaacaagaagtgaaacggctgcttcgtttagataagcccttctataaagcggataagatccaattaccctatacaaataatagttttacagtacgttttgtagcacttagttatgaagatccacacagaaatcgttatacttatatgttgaaaggtattgataaggagtggatacattcatctaataatacggcctcatacaccaatcttccagctggggaatatgagtttttagtttgtggctctaacaatgaccatcactggaatgagaaagcggcttccttatggattgtgataactccgccctggtggcggactagtgtcgcttattttatgtatatactattatttctgtgtacagcttgctatattggttggcgttggaatctctatgtcaagcgtaaatataaacgtcgtatggaggattatcaggttgccaaggaaaaagagatgtataaatcgaaaatcaatttttttatcaatctggtacatgaaatacgtactcctcttagtctgattcggctccctctggaaaagttgagggaagaggaaaaagaagaaagaaaagaaaaatacctttcggtgatggataaaaatgtaaattatctgttgggaataacgaatcagttacttgattttcagaagatggagagtggagcattgcaacttagcatgaaggagtgtagtattaatgcgttgatgagtgatatattcaatcagttcaatggttctgtagatttgcaagggttaacaatctgtcttagtttacctcctgaagaaattagtgtgatgattgattcggagaaagttagtaaaattttggtaaacttggtaggaaatgctattaaatatgcaaaatctcaagtcgagatgcggctaatattattgggcgatagggtaaatataatagtgagtgatgatggccccggagtccctgaaggtcagcaaaataagatatttcaggctttctatcaattgccggatgatccggtggcaacgtctacaggtacagggattggtttggcatttgccaaatctttggcagaagctcatcatggaactttatcattagaaaataggatggaaggtggttcctcatttatattgtctttgccgttggaaacagtagtaacggaaagtattccgaatgaatttgctgaaatgcagatgatagatgtggaaggaaaaaaaatgccggattcggagtttggaaataagagattcattgttttgttggtggaagataatgtcgagttattaaatttgaccagagaatctctaagtgattggtttaaagttttttctgcctgcaatggaaaagaagcactggaaatactttcacgtgagagtattgatgtcattgtaagtgatattatgatgcccgaaatgaatggtcttgaattatgcaactatataaaatcagatctagtttactctcatattcccgttatcttgttgacagcgaagacaacgttagactcaaaagcggaaggttttgaaaatggtgctgatgcatatattgagaaaccattctctattaagcagctccataaacaaatcgaaaacttattaaaactgcgactggccttccataagttgatgattaatctttctggaagtccggcttcttcattggcggattttgctctttcacaaaaagatgtagaatttatagagagggtaaatacgattttgtcggaactgcttgctgatgagagttgctcgatagatttgttagcagagcagatgaatatgagtcgttctaatttttcccggaagataaaggctctgtctggtatgccgcctcatgattatataaagaactttcggttgaataagtcgactgaactaatcatgagtggtatacgaatagctgaagttgccgaacagttagggtttactacttcttcgtattttgcaaagtgttttaaagaaaagtttggggtattaccgaaagattataaaggataacagctagttcctatcactcgtgggggtgccagacggcttttgaagcagggtgctttccttttgggggattcctaaaatgggaattccattttcatcccattctatcttttgtatgcgtgttgtccgaccgtccaaaacgaacatgtcacgaagggcgtttcgagcgtggtaaagtatataccattctttcttgtcgggtgaaggtatgaaacacaggctaccggggccatacacatgattctctggtgcttgtttgaatacaggttccagagatttcttccatgaattcgggttgagaagatcgctgttagcatcagctgttaataaccctacacaataataaggtgtccagttaccgcttgcagagtaatatattaataatttgtctttgtttttggaacggaaaaattgtggagcttcattcacatgaataggataaccggttttattgccatctacactgatccattgacattcccattcgtattcaggtttggatattaatatacggtctgaggctagtgtccatggatttttcatttcagcgatatagatacattgggtttcttgataaattcttctggtttcccatccgcaccagattagataacgtttgccattatgctcgaaaggattagcatgaatagccaagttattatttttatcggtcgatattcttcctttcatgacaaactctcctttcatgggatcgggagattcattttctagcacatatatctgacgattgtctatattaccatcatcagcagcgcaatagatataccatttattgtccatatagtgtatctctggtccccaaagatgagatatacccgagccattttggggcgaatatacgtttttttttgctgcttctgccagttgtgtaatatcatcagtttcccataatatgatacagtctgctaaactttgagtatagtaatattttccttcatgaaagatggcccatggctcggatcctccacctatgacaggatttgtgtagaaaagtgtagagtcaatgcctgtttgtttatcagtctttttgctttggcatgatagacaaacgataagcaatattaaaaataagcaattttgaaatttcatagtgctttctttgctaagatacttgcaaagaaagcacaaattatttaattctggagctgtttgattagtttttattgtttgttagttaggaattagcctataattaataccctcctttctatatttgcaattaataaatctttgggcccattaactattaaatcttattattaactaaatttattattatgatgaacaggacaggaaaaagaatgaatgttgttaaggcattttgtttacttgctttgcttggttgtttcatcggttgtaaagacgatgaaaagagaaaggagcaagcttttgataacagtttgcctattgaaattgtgggcttcgagcccagggaagtcactccaagaacacagttacttatttatggaaaaaacttcggtaatgatccttccttgattaacttgaagttgggaggcgtggagactagagtcgtaaactgtaacaatgagtgcatatattgtatggtacctcgcaatgccggtaaagggactatagaaatttctattggtgatcaagctgctatagctcctgacagatttacttatatagccaatacgcaggttactacgttatgtggctatgtggatgagactgggcgatatgaagtgaaggatggcccattcagtgattgtggtttgaattcgcctacatggctgagcattgatcctaagaacccgaatcatatttatatgattgagaataaaagtagtattcgtttgatcgacatggaggtacaagaactgactacagtggcaacggtggggcagttgaatattcaagatccgcgttctttatgctggagtctgactggtgatactctatttgtgagtaattattccgagggtgattctccgattgttgtcactatgcttttgcgtagcgaagaatttaagaaagctcatccgcttttttccggttataaatgggttatttcggcaactattcatccacagacgggtgacatctattttgctcaggaatcggatgccactatcaaacgctataatatggcaacaaaagaagtggaaacaatgttttctgtgggtggaagctgggtatggatgtatgtttactttcatccttccggtgactttgcctatgtcatgcgtccgcgtgaaggaactatcttcaaatgccagtttaacaagacgacaaactggctggaactgccgagtatctatgttggaaattggaatcagggatacaatgaaggtataggaacgaatgtccgtatgggggtgatgtggcagggcacttttgtgaaaaatgagaaatacatagagcagcataaagacgatatctatgacttttatgtggcagatggagaattgtggggtaaccaccctggagatctgatatggaaggtcactcctaatgccgaggccatccgatacgcagggcgtggaagcgtggcaatggataatagccatttcggatacgttgacggcgatttgcttcaggaagcccgtttcaacggaccgcacagtattgcctttgatgaagtgaataagatattttatattggtgatgagtataatcgccgtatccgtcagattattgtggaataaaaaatagtatgaaaaacatgaaacaacaattcttagttataatagccgctctatgttgttttgcggcaggaatttcggctcagcagtccacccataggcagattgttgtgactggagtggttacggatgaaaatcaagaaccgctcatcggggctaatgtgtccgttaaagacgtaccggggttgggttctatcacgaacataaatggtaaattcagcattaaaatgcaaccatataatcgtttaattttctcttacattggttatgagacacaagagatccttgtgagagaagagcgcacagtgaacgtagtaatgaaagaaaaaaccgaaacgacattggatgaagtagtgattactgctacaggtgcacagaagaaactaacggtgaccggagccgtgtctactatcaatgtagaacaattaagaacctctcctacaggtagtatttccaactctttggcagggaatgttgcaggtataatagcacgtcagactagcgggcagccgggaaaaaatgtttctgaattttggattcgtggtatctctacgtttggagcggggtcaagtgcattagtgctggtcgatggttttgaacgtgatatgaatgaattgaattatgaagatatcgaatccttcaccgtattgaaagatgcttcggaaacggctatttatggatcgcgtggtgctaatggtgtagtcttgattactacccgtcgtggtaagatcaataaaataactgttgatgcgaaagtggagacaatttacaatacacgtacatttactcctgattttgtagacggtattacttatgctaatctggctaatgaggcgcgcagaacccgtaatctcgaacctatttatagtggaaatgaactaaaaattctcacacaaggactagaccccgatttattaccgaatgtggactggatggacaccttgttaaaaaatggagctatgagttatcgggcaacattgaatttgagtggcggtggacagaatgcacgttatttcgtttcgggcagttatcttgacgaaggtggtatgtataaagtagacaaatcactgaatgaggactataacaccaatagtaacaataagcgttggaactaccgtatgaatgcggatattgatgtaacacgtactactttgttgcaagtgggtatcggtggttcgctaaaaaaaatgaatgaatcgggtatgacttcacatgagatctggaatagcattttaaatcaaactcctactagcatgcccattatgtactccaatggatatactcctaccaattcggacggtgatattaacccatgggtagcttccactcaatgtgggtataatgaacagtggtggaataatattcagactaatattactttgaatcaaaaattagatttcattacgaaaggattgaattttatagggcgttttggttttgacacagataactataattttatcaagcgttataaatgtccggctttatggagtgcggatcgctttagaaaagatgatggtactatcaattttacgcgaaagcgggcagaacaagaaatgacccagacttccggcaatacgggtgaacgaaaagagtactttgaagccgaactccagtataaccggaattttaaatcccatattcttagcggaacattgaaatatacacaggattcaaaggtgaaaacccaggagattggtaatgatatcaagaattcgctccctatgcgccatcaagggttggctggaagaattgcctataattggaattatcgctattttctgaatttcaatttcggatataccggttctgagaattttgctgcgggtcatcaatttggtttcttcccggcctattctgtggcatggaatatagcagaagaaccctttgtcaagaagaacctgaagtgggtaaatatgtttaaagtacgttattcttggggtaaggtcggtaacgataaaatgtatgaagctaatggtactacactgatacgttttccttatttatatacaatcggttatgggggtgctcccaatatttggggagacaatgccggttattattctgccttcggaggatataactgggcggattatggttatgaaaagtatggaaccactctttttcagggattacgttatacgtcttatgctaatgacggtgtgacatgggaaatcgccaccaagcatgacatcggattagatatgagtttgtttgacgataaattcaccttgacaatagactacttccatgaagaccgtaagggcatcttcatgtaccgtagatatcttcctgccacagcaggtgtagaaaatgggatgacacttccgcaagctaatgtggggaaagttctctcaaaaggagtggatggaaaccttgcatataagcagcaggttgggagtgtccaactcaccatgcggggaaacatgactctatcgaaaaatgaagtgaaagataaagatgaacagaacaatgtttatccttatttaatggaacagggataccgtgtgaatcaggcgaaaggtcttatagcgttgggattgttcaaggattatacagacattcgtaatagtccgcagcaaactttcggtgcctaccaaccgggtgacatcaagtataaggatgtcaatggtgatggaattatttctgatatggatagggtagccattggagcgactaccgtccccaatttgatttatggtatgggtatttccgctcagtggaaagggctagatgttaatctgcattttcaaggagcaggtaagtcttctttctttatcaatggaagcggtgtccgtcctttcgtcaacggtagcaaaggcaatatattaaaagacgtcgtagccggccgttggatttcaagagatgaatcgggcactgaatccacagaaaatgtgcgggcagaatatccccggttaagttatggcggaagtaacaacaactatcaagaatcctctttctggttgcgtgatggctcttatgtgcgtttgaagactttggaaataggctataccttgcctaagcctctcgtcaacaagatgcatttcaataatgtacgcatttatttaattggtaccaatttgcttacttggtcaaagttcaagatgtgggatccggagatgaacagttcgaatggagcagcttatccgttatctaaatctatcacagtgggattaaatgtaaacttataaaaaatgaaaagtatgaaatggttatataatactggtgctatactatttatggtctgctatctggcatcgtgtagcgattatttggaggtggaacataatttcaaggaccgcctgacgattgagaaagtgtttacgaacagggattatatggattcgtggctttccaacacttattcatatctcagaaaccaaaatcaggatattggtggaaaagagagtgtgccgactaattttgccgatgatatttattgggcagattggaatgatttggggaataagcctatagcaggtggttattattcttatttccgaaatgtggagtataatgaggattggatgcaagagacttatactaattgctatttgggtatcaataaagcatgtgtttttttgaagtatatccacatgaatacgcagctgacagaggaagaaaggcttgattatgcagcacaggcacgctttgtgcgagcttactattactggttgcttttgcgtaagtatggtcccattcctttgattccggataccggagaagattatacacaggattatgatgcattagcccgtccgcgtaatacgtatgacgaatgcgtggaatatatcacatccgagatggtgttggcagccaaggatcttcctttggagcgaggagccaacaatatagcgcgtcctacccgtggagctgctttagccacccgtgccaaagtccttttatatgccgccagcccgttgatgaatggcaataccgattcttatgcacaacaaatggtagatgacgaaggaaatcgtttgctttctgccgaatacgatgaatcgaaatgggcaagggcagctgctgctgcaagagatgtgatggagttaccgggaaataataatggtcatcgctatcaattgtacgtcaagaatcgtataagaggtggcggtacggacgattatccggagaccatcgagccgtttgatgataataacttctccaaaaaaagttggccggacggatatgccgacattgatccttttgagtcatatcgttctgtttttaatggcgaactctctgcttatgcaaatccggaacttattttttcacgtgtggataacataacggtcgatcatactggagaaggaactacctcaccggatggcattgcaaacatggtattgcatcagttgccgacggtggccggaggatggagtatgcatggaatgacacagaaacaatgtgactcctactacatggccgacggtactgattgtccaggtaaagataaagagatagggcggggagatggaagtgcccgattaagcggttatgtgaccagtgaagatgtagatgccggtcgctacaaacctttgcgcgccggagtttctttacaatatgccaatcgtgaaccccgtttctatgcatcagtcgctttcaatggcagtgtgtggaatatgtcttcattgaatggaaaggatggagctgccagtcctaaccagcaagtctggttttatcgtgggacttccgaaggatacaatggcggcaatcgtatatttacaggtatcggtatcaaaaaatatgtgaacccttatgatgctaaataccaaaacagtttttattacaggcaaaaaacagagactgctattcgctatgcggaaatcctattgatttatgccgaagcattaaatgaactggatggaagttatgacatcccatcctgggatggctcggcaatgtacacattaagacgtgatgtgaatgaactgaaaaaaggtatccagccggttcgtattcgtgcaggtgtgcctgattatacctcttccgagtatcagaataaagaaatgttccggaagaaactcaagcgcgaacgtcagatagagtttatgggcgagaatcaccgctattacgatttaagacgttggaaagatgctcctcaggaggaagaaacattgatttacggatgcaatatgctgatggatgaagctcgccgcgatttgtttcatacgccggtggcaattatgtcgttgcctgtccgctttgtagaaaaaagctatttctggccctttagtcacggacagttacagcgcaataagcggctgactcaaaaccccggatggacttacaatgattaaccttatataataaaatgaatatgaaagaaagaatatattatccgttacttgctgttttgatggtattgttttgcacagcttgtaatgaagaatggactgacgaacaatatgaacgctatgtttcatttaaggcgccgatgaattatgcaaaaggagtgactgatatttatgtaaaatacaagtcgaatggtatggtaacctatcagttacctctcattatgagtggctctacaatggccgggagtgatacggaggtacaggtagcgatagattcagacaccttgaaaagtatcaactgggagtattttcataatagaaaggatttgtattacagagagcttacctccggttattatgagttggatgacatgaaagtaatgattccagcaggcgattgcatggggattttggacatcaattttaaactgagtggaattgatttggtcgacaaatgggtattgccgctcacaattgcagaaagtccgaccggcagttatgagcctcatccaaggaagaactacaagaaagcattattgcgtgtgattcctttcaatgattactcaggtacctattctaccacaactatgcaagtaggctttaagaatgccggtaataaaatgactactaatgaacgtactgcatttgtggtagacgagcattccatattcttctatgcaggcttgataaacgaagaggaattggaacgcagaaagtacaagattattttcacgctcaatgccgacgggacagttactctttttgctcccgatccggacattcatttcaaactgataaaaaatccgacatggaaagtgacggaaaaaatggacgtttcgttgccatatctaaaacataaaacgattactattgagaatttcaaatatgagtttgatgatgtcacttctgtcccgggcactcctataagttatacggttgaagggactgtgaatatggaacgtaaaattaatattcagattccggatgaagatcaagcaatcgaatggtaataatttgtaagtcggagtgatatgtataaatggattatattaatgtcgggattatttgcgtcactgaccgcttgtgccaaagttaagttgtctcctttattttccgataatatggtacttcagcaagaggctgaagtacctgtttggggaaaagcatctccagaaatgcgagttatagtgattccttcatggagtggggagaaatatgagaatatagctgacaggacgggtaattggaaagtaaacatcaaaaccccaaaagccgggggaccttatcatttagaaataacggatggagaaaaagtaagattggagaatgtaatgattggtgaagtatggctttgttccggtcagtcgaatatgcaaatgccagtagaaggatggggcaaagtgaaaaactatcaacaagaggtggcacaggccaattacccggatatacgtttgatgactgtgagtaatactattagtctaagtccgtcgcaggagtttactgctgtcggaggaggatggcaagtgtgttcatcggttactatccgggagttttcagcaacagcctattttttcggtagggaaatagcacgcacgcagcaggtaccggtaggacttatctgtgctcattggggcggtactaatatagagtcgtggataagtgctcaagcattgggcgaagttcccgattttgttgagcaattgaagcttatccgaaggttgggaaacaaggattgtgatttacaggcggaggaagaacaaaggcaggcaaagattttgtcgttagataaaggaatgagaaatggaaagcctttttggaatactctttcttataatgatgaaggatggatatctcattctttccccggaaatatcgaaaagacttttcctgattttgatggtattgtttgggggcgaaagatggtggatattccagaacaatgggagggaaaaacgttgagtttacacatggggtatgtggatgacgaggatattacttattttaacggaatcgagatagggagcacgaaaggatatactcgttcccgtacttatgaaataccgggtaatttagtaaaagcgggcaaagctgtaattactgttcgtatcgtggatactggaggagggtgtggcatcggaggtgaaatgaagttaagcaaagatgtcggagactggattcttatatctggtgaatggaagtgtaaagttgccgctcaatctcatattgacccagtgtttgagatgaatccgaatgtgcaaactgtgctttataatgggatgattcatccattggcaccttacaaatttcgtggggttatttggtatcagggagagaataatgtagggcgtgctacacaatataggatattgcttccattacttattcagagctggcgtgaggaatgggggaatgattttcctttctaccttgtgcaattggctaattatttagagagagcagatgaaccgggagactcacagtgggctgaattacgagaagcgcagcgccagacagctttgtattatgacaatgtgggtatggccgttaccatagacatcggcgatatgaatgatattcatcccaaaaacaaacaggaagtagggcgtagacttgccttattagcacgtgccgatacctatggtgagcggattgtttgtagtggtccggtttatcagacttaccgtgtgaaaggagacagggttattctctcttttgagtgtgcagacggaggattaaaaacgtctgatgggaaaaaattgacagggtttgccatagcagggatagacggaaaatatcattgggcggaagctgaaatctgtggaaatgaaatcattgtatcatcggaaatggtaaaacatcctttgactgttcgctatggatggggagataatcctacatgtaacttaattaacggtgcaggattaccggcctcttcatttcaaactttacgttaaacttaaaaaaacaagaaaaatgaagaaacttaactttttatttttaggcttattatcttttatgccaatctggggatgtaacgatgatgattcattaccggaggctgttgttgaagtcaaggaagggcataatgaagatattgtatcagtcattgattatgatattaagaatgatggaacactgattggttctcaacttaataatttggtcggtcagtcttatgggaaaacgctttattttcctgccggaacttataacttgacggagcctatcgttctgccattggaatataccaaaaatgtaaaccttatttttgataagaatgcaacggttaaaagtgatgtccatttggaagcattgattaaagtaggttattcagaaacctattttaccgatgtttcacatcggcgattctcttatatcgaaggaggaatactagactgttataatgcagataatggaattctagtaaacggaaggaagcagttggtgcagatacgtacgatgagtctggtgcgaggacgtaatacacatatccgcatacacgttcctgaaggtattggaactggtggaacgggtagctcggatacaaagatagataatgtaacaattcaaggcatctcttcgaatgataatgtatacggtatctatatagatgaatcttgttgtgattgtaagatatctgacacttttatttattgtacaaaagaagctttagttacgaaatctgccggtcatatattgaacaatgtacatattctttcttgggatactaccggagggacccatcttgaggatggtaagaattaccgttcaacagtcggaatacgtatagctagtggcggattttttgttttcaatcaagtctattatgatacgattgatagaggaatcgtcgtgaatgagggttatagtccggatttgatgctggaccaacagatttctttttcatatttgaataattttggaaccagctttattcaggcagaagggaataaccccaatttgaaagtgaagttgtccaattctacttttactgtattaaatgataattttaagattctagattgtcctgttgatttggtgggatgggatattgcggataagttttctttcctgaattgtgtagttgctaattcacagcgtttgtatccttacgaaacgactttgatgcagaagcttagaggggtaagttctgacgggataatatggacaactttagctaattatgatatgaattggaatgtattaggggctgtcatttcttctccaatgcggaatacccttgagatagatttagccgataatttgactgtaaaacttaattttatgtttaaaggcgttgaacctctcttgcaaggttatgaagtgctgggagaaggagtagaggatattgaatttggatatgctgtttccggtcagttctgtgtgttgctgttcagggcaaaaaggaatgcttctttcaatccaatcatttacgatacattaggttccgggcggtttatgccgactccgtataaaggcaaaaaatatacgcttgttgattatgggttaagtgattcggatattaagattttatctcattaatgtaagtatctaaataatgaagtgattatataataagtaataaacatgaaatatcaatacttgttattaggcgttctatatgggttgttattgtcttcctgttcattgtcggctgaagaaggagataaagagatggatcgatatattgccaatctgatgggaaagatgacactgcacgagaagttgggccaattgaatcttccttccgggggtgatttggttactggtaatgtaaatagtgccgaacttacgaaaatggttcgtaaccaggagattggaggattttttaatgtgaaaggaataagaaaaattgttgatttgcagcgtatagccattgattctacccgtttgggaattcctttgctggtaggagctgatgttatccacggttatgaaaccattttcccgattcctttagcgctttcttgtagctgggacacactagctgttgaacgtatggcacgcatttctgctgtagaagccagtgcggatggtatttgctggacattcagcccgatggttgacatttgtcgtgacagtcgttgggggcgtattgcagaaggtagtggtgaagacccttatttgggttccctgttagcaaaagcctatgtacgcggttatcagggaaataatatgcagggaaaaaacgaaattctttcctgtgtaaaacactttgcattatatggcgcatccgaatcagggaaggactataatgtggttgatatgagtcgccaacgtatgtataatgaatatcttgccccatacaaggcagctgttgaggcaggtgtgggtagtgtgatgagttctttcaatttggtggacggcattccggctacggctaataaatggttactgaccgatttgctccggaatgaatggggcttttgtgggttgttagtgacggattataattctatcgccgaaatgtcctcacatggggttgctcctttgaaagaggcttctgtacgtgctttacaggcgggtacggatatggatatggtttcttgcggttttctgaatacattggaagaatctctgaaagaagggaaagttacggaagaacagattaatgccgcttgtcgccgtgtattggaagcaaaatataaattgggcttgttctctgacccgtataaatactgtgataccctgcgtgtggaaaaagaactttatacgactgctcatcgcgcggtggcgcgtgaaatcgcagctgaaacatttgttctgttgaagaatgaggatcatctgcttccgctcgaacggaaaggtaagattgctttaattggtcctatggctgatgcccgtaataatatgtgtgggatgtggagtatgacgtgtactccttcctgtcacgggacattattggagggaattcgttcggcagcaggtgataaggctgaaatactgtatgcgagaggtagtaatatatatcatgatgcggaacttgaaaaaggaggagctggtatccgtccgttagaacgcggcaatgaactgcaattgttggatgaagctttgcatacggctgcccgtgcagatgtgattgttgcggctttgggagaatgtgctgaaatgagtggtgaatcggcttcacgtacggaactagggattcctgatgctcaacaggatttgttgaaggcgctggtgaagacgggtaaacccgtagtgttgctcctttttacagggcgtccgttagttctgaactgggaggatgccaatgttcattctatcttgaatgtctggttcggtggaagtgaaacaggcgatgctattgctgatgtattgttcggtaaagtgactccgggcggcaagctgactacgacttttccccgttcagtgggacagcttcctctgtactataatcatttgaatacaggtcgtcccgatcctgacagtcattcttttaaccgttactccagtaactatctggatatgagtaacgaacctctttatccttttgggtacggtttgagttatacaaatttctcttatgggaatttacaacttagttcggatgtactgtccagaaatggggagttgacagtgtctgtgactgtaaccaatgacggagattttgacggatatgagatcgtacaaatgtatctgcatgatatttacgctgaaatatctcgtccagtgaaagagctgaaaggctttgaacgtatcttcttgaaaaaaggagagagtcgtgaagttaagtttgttatcacggaagacgatttgagattttataattcaggattacaatacgtttatgaaccgggagaatttgatgtcatggtaggagcaaactctcgtgatgtgcagactgaacgttttagggcagattgatcgtatataaactttctttttctaagatgtaaatattcttttgattataactaaattatggttgccgctttggactacaaaacagaaactttcggttgtagctaaaggcggcaacgttgtgattggaagttccgtttatcatttgaacttaaagatgcttgacttatctttttatttaggatttagttgtttaccattcgcaatttggttgcaggtacattatttaactgcaaacttaactatttttcagttcaaaatgtgtattttcgcccgttaaatagtaaacatgcatttatgaatattcaagttatcaataaatcgaagcatccgcttccggcttatgccactgaattgtccgcaggaatggatatccgtgctaatctttctgaacctatcacactggaaccgttgcaacgttgtctggtgccgacaggactatatattgccttgccgaagggatttgaggcacaagttcgtccacgtagcggactggcgatcaagaaaggaattacggtgctcaattctccgggtacgattgatgcggattatcgtggggaagtttgtatcattttagtcaatctctcctctgaaacgtttgtgattgaagacggtgaacgtatcgcgcagatggtgatagcgaagcacgaacagcctgcatggcaggaagtagaggtgctggatgaaacagaacggggagccggtggtttcggacataccggagtatgatgaatgcttaatggagaaaatagaatgaagataaaaataggatggctgttcgtgacggtattgatgctcacttcatgtgggggaatccggtctgtgcgtacagcaaaaacaacagcgaaagcagatggagcttctttaatgaaggaaacattgctttctgctgaacaacagcgtaaatatgactacttcttcttggaagccatgcggatgaaaggaaagaatgagtatgatgcggcatttggattgctacagcattgtctggatatcaaccccactgcttcttctgcgctttatgaaatatcgcaatattatatgttccttcgccaggtgccgcaaggtcaggttgctttggagcaggcagtggcttttgcgcctgataactattggtatagtcagggattggtcagtttgtaccagcaacaaaatgaattggataaggctgcggctttgcttgagaagatggtgacccgtttcccgtcgaaacaggaccctttgttcagccttcttgatatttacagtcgccaggagaagtataatgatgtcatttctacattgaatcgtttagagaaacgtttgggtaagaatgagcagctgtctatggagaaattccggatttatcttcagatgaaagatgataagaaggcatttcaggaaatagaaagtctggtacaggaatatccgatggatatgcgttatcaggtgatactgggagatgtatatcttcagaacgggaaaaagcaggaagcttatgatgcataccagaaggtactggctgtagagcctgataatccgatggctctcttctcgatggcttcttactatgaacagaccgggcagaaagaattgtatcaacagcaactggatacgttgttattgaacaaaaaggtgacttctgatactaaaatcagtgtcatgagacaggtgattgcggaaaatgaacagtcgtccgctaaagatagcactcaggtgattgccttgtttgaccggatgatgaagcaggatatggatgatccgcagataccgatgctttattctcaatacctgttgtcgaagaatatggaacaagaggctgtgccggtattggagcaggtggttgatctggatcctaccaataaggcggcccgtttgatgctggttagtgcggcggtgaagaaggaagattacaagcaaattatcaaggtctgcgaaccgggcattgaagctactccggatgcgttggaactttattattatctggctatcgcttatcatcaggcagaacagggagatagtgtattgagtgtttgtaatagagcattggaacatataactcccgataccagaaaagaagtcatttcagatttttattctatcatgggggatatttatcataccaagaaacaaatgacggaggcttatgctgcttacgattcggctttggtatataatccttccaatattggcgcattaaataattatgcttattatctgtctgtggaacgtcgtgacttggacaaggcggaggagatgagttacaaaacggtgaaagccgaacctaataattcgacctatctcgatacttatgcatggattctttttgaaaagggaaactatgccgaagcccgtatctatattgacaatgcaatgaagaacgacggcgagaagagtgatgtgattgtggagcattgcggagatatttattttatgaccggcgatgcggaaggtgcgttgaaatattggaagaaggcactggaaatgggtagcgagtcgaaaacgttgaaacagaaaatagagaagaagaaatatattgcggaatgaaaagaatcatttatctactgttgttggtggtagtggtgttggccggctgtaagagttcgaagcacttggcaacttcggaaactaagacttcgacaaaggctccgacatccagttacctggcttccaagcttcagttgactattcccggcaagaaaggaagtatgtctgtagggggaaccatgaagatgaaaactcatgagcgggtacaaatctccttattgatgcctattctgcgtacggaagtggcacgtatagaagttactcccgacgaagttttattggtagacaggatgaataaacgctttgttcgtgccactaaagctgaattgaaaaatgtattgtcgaagaatgtggagttttcccgtttggaaaagatattgatggatgcctctcttcctggtggaaagacagagctgacaggaaaagatataggaattccttcattagaaaaggcaaaagtccaactttatgagttctccacacaagagttttcgataactccgacggaactgacgtccaaatacaaccagattcccttggaagaattagtaaaaatgctggtagctttattatgatgaaacgtttctttgttattctaatcagttgcctttggttggcagttcctcttttcgctcaatcgaacaagttgattcgtgagctggaaagtaaacgcggtgcgctgcaaaaacagattgccgaatcggaatctatattgaaggatacaaagaaagatgtgggaagccagttgaatagtctggctgtgttgaccggacagattgaagagcggaaacgctatatcatggctatcaacaatgatgtggaggctatccagcgtgagttggcttcattggagcgccagttgcacgggttggagaaggatttgaaagataaaaagaagaaatatgaagcttctgtccagtacttgtataagaataagtcgatagaggagaagctcatgtttattttttcggcaaagaatttggggcagacttatcggcgtatgcgatatgtccgtgaatatgccacttatcaacgtctgcaaggggaagaaatcctaaagaaacaggagcagatacgcaagaagaaagcggaacgtcagcaagtgaaagccgccaaagagaacctgctgcaagaacgtgagagcgaaaaggtgaagttggaagagcaggaaaaagagaagcgtacgttggtgactaatctgcaaaagaagcagaaaggattgcagaatgagataaataaaaaacgcagggaagccaatcagctgaatgcccgcatcgataaattaattgcggaagaaatagagcgtgcccgtaagcgtgcgcaggaagaggctcgtcgtgaagcggctgcccgtaagaaagaagaaagcaaggagggaaaatctgttgcaacggaaacgaccgctaaatcgaaacctcttgaggcttataccatgagtaaggcggatcgggaattgtcgggtaactttgccgcgaatcgcgggaaattgccaatgcctatatccggcgcttatattatcaccagccgttacggacaatatgccgtagagggtttgcgcaatgtgaaactggataacaagggtattgatattcagggaaaaccgggtgcacaggcgcgtgccatttttgatgggaaggtggcggctgtattccaattgaacggattatttaatgtcctcattcgtcatggcaattatatttctgtttattgcaatctttcttctgcatccgtcaaagccggtgatatggtgaagacgaagcaatccatcggtcaggtcttttctgacggtacggataatggacggacggtattgcacttccagttgcgtagggagaaagaaaagttgaatcctgaaccttggctgaaccgataattgaataaaaaacacgtagaatgaagttaactaaaatactaatatgcttgctggtcttctggaccggaacactatccgcgtctccttatttttcgttcaagaaatatcaggtagaagatggattgtctcataataccgtgtggtgcgcccttcaagatagttatggctttatctggttgggtaccagtgatggattgaaccgttatgacgggcggggcaataaagtgtatcggaatgttctcaacgaaaagttctcattagaaaacaattttgtagaagccttgatagaggtggacaagaatatttgggttggaacaaactccggactttatatttatgaccgggataccgatcgtttctcttactttgataaaacgacacagtataatgtgtatatcagcagtgagattaaaaagattatcaagacggaaaatggtcttatctggattgcgactttgggacagggattttttatttatgatccgaaaacagaggtgttgactcaaaatagtgttcagacatcttttgtatgggacctctgtcagagtgctggtcggaagagggtctatatatcttccttacaggaaggacttttgtgctttgacgaaaacggcaagtttctccggacgtatgaaatctcattagatataaatgcttccgatagttataaagtgaactgtattcagaatatcgatggagatatttggattggtgcgggaagtaatctattgagccgtttggatgaacgaactgaagctatagacaattacagtggttcggcgtttaatttcggagctgttcattgtttgttgaagtatacggataaagagctgttggtaggaacggataacgggctttatctattcgatcaaaatacaaacacatttcagcgggcggataatcccgccgatccgagaagtttgagcgatcagactatcaatggaatgatgtgggatgccgaaggggctctttgggtgttgaccaatttgggtggaatcaactatatgtccaagcagactaaacgttttgattattattcgcctgcctatctgtccggagtgccgggagcgggggaggttgttgctcctttctgtgagaataaagatgggaatatctggattggaactcaaagcggtttgtattttttcaatgctgttacccgggaactttctccttatgcaataggaggagctaaaaatcaaaagtatgacattcgttctttaatgctggatggtgactatttatggattggaacttatgccggcggaatacgggttatcaatttacgcacaggggcagtgaaagcctatactcattctcgtggaatccccaatacgatttgtagcaacgatgtgttgtgtatttataaaggacggaaaggagaaatttatgtaggaacgagttggggattgtgtcgttatgacgctgctcgagataactttatgaccatcacaagtgtcggttcaatggtttctgttgttgatatctatgaggatatgtacaatcatctctggattgcgacttccaatagtggtgtgttttcttacaatacaatgaatgctcattggaaacattatcagcatgaacgggaagattcgactacgatcaccagtaattcggtcattactttatttgaagatgcgaaagggaccatgtggtttggaacgaatgggggaggactgtgttcttttgatgctaaagagaaaagattcattgagtttgatccgcataatactttattacttaacaaggttatttatgcgattgagcaagatcagggaggtgatttctgggtatccagcaatgccggaatttttaagattaatcctgttaccaaagattatttccgccagttcacgattaatgacggcttgcaagggaatcagtttatagctcgatcttcattgaaatcatccgaaggaaaattgtattttggtgggatcaatggctttaatgtattccagccggaacagtttgtagataacaaatatattcctccggtttatgtgaccgatatccggttaccttatcaaaccgatgagcaggaggtgaagaaactgcttcagttggataagccgctttatatggctgataaggtgactttatcttatgagaacaatagtttctccatccgttttgtcgctcttagttttgaagatccggggaagaaccggtattcttacatacttcgcggagtggacaaggaatggattctgaataccgataacaatatggcttcttacaccaatttgcctcctggtgagtatttgttcgaagtcagaggctctaataatgatcgtcagtggaacgagaacactaccactttaaaagtggtgattactcctccctggtggcgtagtacctttgcttacgtcatttatgtcctcatgctgttgggatggatcggttggatggcttggcgatggaacctccgtgttaaacgcaaatataaacggcggatggaaaaataccagactgccaaggaacaggaagtttataagtcgaagattagctttttcatcaatctggtacatgagatacgtactccgcttagtttgatacggcttcctttggaaaaattattagagaaagagcgtgaaggaaaagaactcaagtatttgtctgtgatagataagaatgtaaattatctgttggggattactaatgaattgcttgattttcagaaaatggagagtggtacgctgcatctgaatttgaaaaagagtgatattaaagaacttgtcagtgacgtttataatcagtttacaagccctgctgaattaaaaggaattgatttgcaactgactgtgcctgaacaagagctggtgtctacggtggatagtgacaaattaagtaagattcttgtcaatctgatgggaaatgccatcaaatatgcgcatgcgcatattgacttgaggctgcttgttactgatgggggatatgagatacaagtgaacgatgatggtcccggaataccaaatgaacagaaacaaaagatatttgaggctttctatcaactgcctgacgataaggtggccacagcagtaggcactggcatcggattggcttttgcgaagtctttggcagaagctcatcagggagatttgcgtctggaagataatattggaggtggttcttcgtttatactgtctcttccgttcaaagagtgggagacggaaaaaatgagcgatattgtagaaatatccccagagcatgcggatgcttctgaaacggtctcttcggagtattcaggaaagaagttcacggttctgttggttgaggataatgttgatttgctgaatctgactcgcgagtcattgtcagagtggttccgtgtgttgagggcttccaacggtcgtgaagcacttgaagtgcttgcgaaggaaaatgtggatgtgatagtgagtgacgttatgatgccggagatggatggactggaactttgcagcaaggtgaagtctgaaatctcttattcacatattccggttattttgttgacggcgaaaaccactttggagtctaaagtcgaaggacttgaatgtggagcggatgtatatgttgagaaaccattctctgttaaacagctccatatgcagatcgagaatctgttgaagttgaggcagtcttttcataaattgatggtgagcttggcaggagatacggttgctgtttcgacaacggattttgcgatgtctcaaaaggattgtgagtttatagctaagatacagggagtaatagccgaacagttggcggatgagaacttctcgatagatactttggcggaacagatgaatatgagccgttctaatttctatcggaagataaaggctttgtccggaatgtctcctaatgattatttgaagacacttcgtatgaatagagctgctgaactgattgtgagcggtacccggatttctgaagtggcagcgcaggtaggatttacttcttcttcttattttgcgaaatgttttaaagcgcaatatggtgtactgcctaaggaatatacaggtcagcctccgatttcaggtgaggcttgataaagaagggataaaagcatataaaaaaactcctgtcgtgcaatatcattggatattttccgacaggagtcaaatataaaataattaatcgagtactctttcttattaattgagtaggctttatttctttttttgtcccgggtaaggctctaccatgcaacgtttagcccatgcttcataagcctttgtcatttcagctactttttcagggtattgtgctgccagattatgcatttcgctccggtcctcattcaggttgtataattcccatttagcgttttctcccggacgaaccagtttccaaccgtcattagagaggaatgcacgttcattgtaatgttcgaatccaaggtagtcatgtccttcacgatgtccggtcttgaagataggaaccagactcttaccctccaatgggatgatgtcatttcctttatatttggtaggataagtggcgcctgccatatcgatacaagtagccatgatgtccatcacatgtccgatttcgggagtcgttttgccgacattcttcttgataccttttggccagtgggcaatcattggagtacagatgcctccttcataagatttggctttccaaaaacggaacggtgtgttggctacgtttgcccagcgtgctcccagtgaagcataagttgtttccgggccaggcagcacttctttgttatgaggataaaccattttctcccctttacgtgtcatatcaggacggtcattttctcctggagagtagttctggcaatcttcattactgcatccgttatcggaaagaaatagaatcagcgtattttcaagttgtcctgtcttttccagggcgtcgataacttgtcctattccctggtccatacggtcgatcatggcagcatgaacagccatggcacgagcatcccattcagcatgtgggttatcttcccatttatctttgaactgtctatcagacaggaaattatccatgttagggaatataccaagctgtttctgacgttcgtaacgggcgttacggatagcttcccagcctactttataggtatccttatatttttcaatatcttccggcagtgcatgcaatggccagtgtggtgctgtgtaagccaggtacataaagaatggtttatcgtctttggcatactctttcacttctttcactgcacggtctgaaagcgcctgtgtgatgtaatatccgtcgggtacttctttcacgggtacttcaccttctaccagactgaatgggtcaaaatagtctactactccgtagatagtaccatagtgggtatcaaatccgcgattcaccggataatgacaaagatcagaataggtttcgtggtatacgtgatgtgcgagccattcgcgttggtctttgcgtagtggagtttctgcgatgtgccatttacctaccatgctggtagcatatcctgattctttcaatacctctgcgatagtaacggcattgcgtgagagtgttccccggtaacccggcaggtggtcatcgaaggtcatacgtccgattcctgcctgatgttgataaagtcctgtcaacagggaagcacgcgtcggacaactccggctggtgttatagaaatgattgaaacgtactccttgttttgccagtttgtccagattaggtgtgtgaatttcactaccgtagcatcccaggtcggaatagcctaggtcatctgcaagaattaccaggatattgggtctttgatcggacttttttcctttggcctctgctgcagaatgtcctgcaaccatcaaggcggttggtaatagtaaaaaattagaattcataagtttaatgttggtttataatttgtttttcactgtattactcttttcctttgtctttgttttcctcataccatttacatactttcttgctcaacttggcaaccaaatcaggatgctcatttgcgatattattcttttcgaacttatccttttccatatcatataattgcgcatcgcttccgtcaccgttcactaataatttccattttccactgcgtatagctaaatgggggcttctgtcataagggttccctggaaagccaaaatgtttgtttcgtccgaagtcccacattaaatcggtcttgcgtttggcttccgatttaccgagaagaacttttgaatagttctgtccatcgcctttgtaacctttttctgttttgattccggctatagaacacaaagtcggatataaatctactgcgcataatacagactcgttatttacttgtccggctttaattttctttggatatctaacgatgaacggcatgcggattcccccttcataaagactatttttagttcctctcaaataagcggaacgtacagatttaaagctgggtgcaggaccattgtcgctagtgaaaataatgattgtattttctcccactcccaactcatccagggttttgatgaaacgtccgagttgtttgtccatctccgctagtacaggagcaaatgcttcttgtgtttcccagctttttctttccttttgtttgaattccggtacccaaggggtatgcatatcgtccggccataggtttaggaagaagggttcgtctttgtgcttttttacaaactcaatacttttatctacaaagtattcggtacgtctccagcgtttcacgctgtctttatccgaccagatccacttggttgcagtgattgctggttccggatccggactttcataggttgatatgtattcgtcaaaaccgtaatttttaatagaaggagcattatgcacgtcacgtccgcctcccatgtgccattttccgatgtgtcctgttgagtaacctgcattttggaaggcacgcgccatggaaggcaacttgtcatccaggaaattacgttgttcgcatctcttattagcagctttgtcgttcaggaaagtgttgattcccacttcaagaggaaagagacctgtggttaatccacaacgggatggagagctaaccggcgcagaagagtaatattggttgaataatagtccgtcctgtgccaacttgtcaatattaggagtaggaacgaatttacctccataacaacctatgtcaccgatacccatatcatcgatatagataattactacattaggttttgtttctgcttgtgtgttagcaatagggagtagggctcccagccagggtaaatgttttttcagattcataattattgtgatttaattaacttcagtttttcatgatgacttttcgcaaaagtagggaagatatcagagaaggaaggaaaaatactaatcaataaaggaaaaaaaatggtagaatgatagatttcttctttcttctattgggaaaacaggaatagagaagctcgtagaaaccgagaacttctctattcttctaattattctatgatacgatcattggggaaagtatcttgaatgggagctttacttcgccacggttttagtcagtaattgtacccatgagtatttagtgttttctacccaattatccggtgagacttcgatagtaccagtttttgctgttattttttgtatgcaaatcaatcctttctttccattggctgttttaaacaggtaaactttatttgcctgaatagctaagacttcggaggttggatctgccagattttctatcggagttgcatctacttgggagattgcattaaattctgcttgtgataaagaggtttcagcaaataatgtgtgttgtaaaccattaattgtcatcaagccataatcacttcttttagcaggtgaaacaagaactggtacagcttcgcttcctgaaggcaagataatatctccgagtgagaaatcgacttcgtttgtatatttcatggcatcagcagccatataggtgcgtccgagaagccatgttgcataataacaaccataataagctgaagctgtctctactatttctccatcttttccataatccggatcggagaataaaacagaaggagtaatctctaccaataagttacgttggtacgtatggccgtcggtacctagaacgactactgtaatacaggcattctcttttaaagaagtaaatttgtaagttgtttcgtaattagtcgttccgtctgcaaatgactgggcagtttcttctatcagacttccctgcattccggttttggagtctgcctgataaatttcaaaactcatgatttctccctgtactttgacggttgctgtgtattcagcaatccctttcgttaatgatactctattattctgatcgacacccgcaaattcgattttgacaggtgcttcataatcaacttcatatttatctgcacaaccgaataatccaaataaactgattgacagaattaatgcaattatactatttgttttcatgactttatttttttaagtaaacattctatttagattagtatcctggattctggtagatattcgggcagttattaacttcatcctgtggtattggagccaagttcatgcgctcgttataattacgtgtgtctaaagttacccgttgatattcaccgttaattttctttattccgacagccggtaacctcattacatcttttgctatcagccatcttcttatgtcaaagaatcgatgatcttcaaaacaaagttctacacggcgttctttgcgtatgcgttcccgaagggttgcctgattataatctgcggccagtaagtttgtcgtgataccggcacgacgacgtatcctgttaagctgggctattgctttttctctggctgtattcgtatcttcagcctcattctcggcttctgcataatcgagcaggatttctgcatatctcatcattggaaagtccatgtaagtggtaccaccttttcgatgatcgatacggtcatccaggaactttgtcaggaagtatccgcttccccatctatatgattttgacaggtctattgcagctggcttaccgttgactaaaggccaggtagcaccatcacatagaatactctgtgccaaacgaggatccctgttagcataaggagaatttacattgtaaccggagtttgggttgatgatggctttcgtatttgattcgtaaccgagaatgggttgtgagccgtcgagcatatcataacagtctaccaaccattggttcggacaagtcagtagttctttatttacattccaggggtcaaaggcaggcatcattccgtaaaggtcatttgccggtgcacggagaaatcccatgattacctcaccattggcacgggtattgaataatcgtgtgtagctcttttcgggagtggtcggatcttcatataaacgatagaaatctccattgtcagcatattcaatcatatcgtaggcagcatcagccgcttctctccaagttactccggacgcattgtgtaagggacttgctgcataaagtaatgtgcgtgccagatagcctagggctgctccccgggtagctcttccgtaatctgctgcatcgtatttgtcgggcaatactcccggctctgcaagttctttgaattcattagcaatccaacggactgtggtttctaacgattcacgtttgatttcgtcataaagtaacggatcgagttctttgtctccgattactaatgctccgtagaaacgaaacagttcgtggtgatacaatgcacgcagaaagcgtacttggtttttcagggaaatcttctctgcatcctccaatggtgaacggtctacgttgttcaggaatgtgtttgcggaacggatggccttatagtagaatatccatggatggtcaccgccaatcaaacctttggaagcatcaattccccctttgataaatttctcgagttcgggaataactgcccctccggcacgggttgtatttccggctccatcgtctgttgcgttgtcaagcatacaaggcgaaccaccaatgtttgccaaaaaaccaaaactgccaaggcggtctcttcccatgcgcatacgtgcatacaagtcgtatgcaactttgcgggtcaatgtaatgtccgaataaactttctctgtatccgtcagatccagttcggtttctttcatcaggctatctgcactacaactggcaagcaggacagccgttacaaaggatataaatagttttctcataaattattcatttcaaacattagaaattcaggttgataccaaaatttattactttttgttgtggatagaattgtccattactattgttcgatgattcagggtctaccttctttacgttatcccatgtaaagagattgtaggcattcgcatatactctaagtgaacgtactccgaattttttcaatagtttgcgaggtatagtgtaacctaactgaatgtttttcagacgcaagtatttggagtctttcaaccaatagtcagatttataataattaggatgcgcggcagtggctgccttagtgaaacgtgggtacgttgctgttgctgctgtttccggtgtccatcttccgatatgctcttcgtaataattaccccagaaattatcccatgcaatatcctgttgcagatagatggatgaacgggctgctccctgaagcaatatactaaaatcaattcctttccagttcaaaccggcagcaagagagaaagtcatttcgggtaccggattatagccgataggagcttggtcgttagaatcgatcactccatcatgattcaagtctttatatttaatatctccaggtcggcttacttgtccgaattgaacgggagaacttgctatatcttcataagagctaaagaaaccgtcggaaatatagccgataaactgtccgataggatttcccgtttgtgacatataggcatagggctttacagattcacttttctctacaatttcattgtgtgcatatccataaatcccttttatggaatatccaaaatctcctttttgatcttgatagcctatttccagatcatatccctgatttgttacgacaccatagtttatgggagccaatccgtttgaaccggctgcttgagaatatctttccggttcacataggatattactacgacgttctttaaaaaagtcgatactggcagatattttgtctttcaaccatttggtctcaagtcctaagttgtatttccgtgcaacttcccatgtgatattttcattggcgctttttccttgaatcagacctttaatcgcaggattatgtgtctctccaaaagtgtagcctagtccttcatcgtatcctgaacgataatagtaagagaaacctcccagcttgtcattaccaacttcaccataagagaagcgtagtttagtaaaacttaagatagggttttctttaaagaaaggttcgttagtcagtacccatcccactgatgctgcaggaaagagctgataacggtgtccttccgcgaaacggtttgagccgttatagcctgcgttaacttcgaatagatagcgattctcataatcatagttaacacgtcctactaaagcctgatagatatgaggtacataagaatagcgtccaccgggagtggaagtgtaactcatattataaagtaccaatccagatatattatgtccggagaaggattgcttataacgaactgccgcttcagcatacttgcgatgtgtagctgccgttttattggtggcttttgttggcaacaccatttcaagtccttgtttataagtcccgtttacaggattatattgatagatattgggacgctgctgtatgcttcggttattgctccagcctgcatcgtaagagaattttccgtctatacttaatccttttaacagtttccttaggttatatttaaaagcaaaatctgtctcaagtttgttattgaaattaagaaaaaatcctgaatagcataatgtcacgagtggattctgtctccatataccatcggcggcggcataagttccattcgcatttaagattgggaatgcttgaggagaattgcgatagaacatgccgaacagacgcagtgcttcctgtccgtcagcatcatagccataggggcggttctgacttccgaaacgataagcaagattcacggataccttgaaatcttcagttaggttgatatcgatattcgaacgagtggtgagcctactgtacttatattccgaattataaccttctttgtataagccttttgctacatcgggtgaggctgctaaaagagcttgtattgtctcatgttctttaattttgtctacgtctgtctcaaacataccggtttgagtgaagtatccaacggaaacgaagtaacgtactgttttatttccgccggataggtttacattgtatttctgttggagaccatttttcgtaaacatatctacaaagtcattgtccgggtgtgtaaacgggcttttctgggtacgatagagatagttgtcatattctgacaggaaaagcccgcgagtattaccggtatcggaagggtcaaagccatcattgatagcaccttcacgcatgaatcttgaaacggattctgcacttagggtttgagatatacgattgaaggaagtgacaccgaattcagatgagaaggatattcgagtctctccttcacgacctcggcgggtagttaccaatatcacaccatttgctcctcgtacaccgtatacggcagttgcagaagcgtcttttaatacagaaatggtttcaatgtcatcagggtcgatttgcgccataggtcgttctaccccgtcaatcaatactaaagggctagagtcgttcaatgaagcacgaccacgaacgaacatcgtagcctgatcaccgccgggacgtccgctctcttgtcgggttactagtcccgggatgcggccacctaaagcgtttgtgacacttgatacaggcatgcttttcaaatcttcggtcccgacattagaaatagaaccggtcagagatacttttttctgtgttccatatcccaccacaacaacttcatctaattgtgcaatgtcttcttccaaagtgatattgataaaaggatgattcttttttatggcaatagattgttctataaagccgatcattgagataagaagtgtttgctctgctttgttggacaatgtaagagtaaatttgccatccaaaccagtcactattccattattagtccctttctgaaggacagtagcgccaatcatctccattccttgggcatctttaacaattccgctaactttggtttgggcacagacatgccagatggaggaggttaagcatatgaataatattattatctttttcatgttttctatctattaaatagttttgatgcccgttaccaacctggattctgttggatggaagggctttccttgattactttcagaggaataggatgataatacatgtaatctttaaaattgcgtgcttcatctactgtaatgcgtgtataatgaagcccggaagcattttcttctactttcattccgataataggttctctaagttgattgccatccatccaacgtcgcaaatcgaagtaacgatgttcttcaaaacagagttcgatacggcgttcttgcttcactttttccataaagttgttatctgtcaccccattaagaaatttatcatttgttccgaatcctgctctggtacgtattttttgtacggcttctattgctgtcaaaccatagccttctggatccgcactcatgccgtaagcgtgatgcatggcttctgcgtaggaaagtaggatatcagataagcgaatcatcgggaataagtggaaaacggtacccacattggcctgtccgaagttcagtgttttgtccaggaatttagctaaataatatcccgtattggtcgaacggttcttcacttggttgagtccgtctatggttgtgttatcactaattcgcgtataaatggtattctttccataaaccgaaccgtcatatccgataattgctgccaaacgcgggtctctgttagtatacatgcttgcaccgtcagaagaatgggtataatcgcttccatctttcatggtaaatgcatcgatcaattgctgtgaaggtactgtacctcctccctgatcttttgagattgtagggggataatgtctgttttccagaccattgtccttagcagccgtatagaataggatatattccggattaggattggcattgataaagatcttgtcgtacgttttagcagcagtaagagctatcagattatattttttatttccattcggagatattgttccgtctgcatttagattgattacatctgcacaagctttggctgcaagtttccaacgttccgtcacatccgagccgtcagtatagcctagtagtggatcgttattatccgttctgttgtagagtgggcttgcggcatagagtaatgtcttggctttaatagcaagtgccattcctttagtcatacggccataagaaccatttccaccttccggatcaactttcaacacagcggcagcactctcacataactgtacgatgtgattgacgcagtctttgaaagagtctcttgcctttgtctgcagttcaggatcgtcgacttcgtaaatacgatcgacaataggaaagcctccgtagtgtcttaacaggttaaactcgaataaggcttgtaaacattcagtttccgcacaataggtatctttaaatgtctggatgtcttcttctgtcttattttgtaacaccaagtcagcctcacgtaaatatttgcgggcaaaaatggcctgttgaattcccttgtatgacttattccaacattcttcaatcggatttgaagaagtgacatacccacgagacaacttatgaatatccgaatctatgattgtacttattccatcattggtggctgcatctaaaaaggcatttcctacgtggttgaagccttcgggaatatatgcatacacctgattaatcggtttcagatagttctgttcattcgtaaaaatatcatcaggctgggcccagtcatagggcatgtcatccagataatcacaaccggaaaatgttagtgttgcgcttattgccaaataaattatcgattttttcatgctatcagaattttaaggaacaacctatactcatgtttctcgtcaaaggagctgccagtgaaggagcttcaggatcaacccatttatattttgtccaggtaatcagattcgttccgctaaggaaaagtctcaatcccttaagatggattttctgtatcatttttgtaggaaagtcataggcaacttccagtgtttttaatcttaagaaatcagcatctttcacatttaatgtacttatctgcctgttattaagattggcattgtccagtgttgttaaacgtgggaatgttgcattctggtgttcgggtgtccagtaatcaagttgatgctcaaatatggttccgttatctgtgaaaggattcatcacaatgtccgaatattgacgagagacttttgcggctccctgaaataatgcggtgatcgaaaatcctttgtagccgactcctaagttaataccatacatgattctgggaatgtctccgtaaccgataggtaccatatcgtttacatcaatctgtccgtctttgtttatatcttcataacgtacatcacctggttggacatcagagaatgtttgtacaggagaggctgctatttcttcccaagaattgaaaaagccttttgcgatgtatcctcgattttctcctaaaggccgtccctgattcttcaaccattcgtatggctgatctacttcaccgtttgcaatcagttcattcgtagaataagagaatgtaccacctatgaaatagctccagtctgcaatatttgaattccacatggcagataagtctactccatggctattgattttgcctatattctgcttaaattcctttacattgccgacaagagaactgattttgttatttactacatacatatcatgacggttgtctttaaaaaattctgctgtaacagataaccggtctgaaaatagtcgggtatctattccgatattcagaattctagctttctcccaagtcaatccgggatttggaagtatatcctgaatgtatcctccaagctttgttcccatgtttacccctgtgatatagacttcgttttgcggccacatacgtcccctgtaataaaaggcatctacgccggatgagttgccgacttgtccataagatgcttttagcttcaggtagggcactattttttttgcatctttccagaaagattcgttagaaacagtccatccggcagatattgtagggaagaaaccgaatttgtgtcccggaccaaatttgtgagatccctgataagctccgataacatcgatgccatattttttatcataattatagccgaaccaaccatttacgctttggaatcgggttggcaataccatttcatcattgctttcatattgttcatagaaagctaaagccgaaactccatgttttccaaaggtacggttataatctaattgagccacgataccggtccggcggaaagaactggtattatctaccttgtttatcattgagtcatcttcacgggtccggcggagaacattctcattcgtcgcatccttttcgtaatatgcgaaggttattgtacgtctgatagaagaaattgtgcgtgaatccatggatagagcaacggaaacttttaatccctctgttatggaggaaagatcctgtgagagttttgtgcggaaagaaccatacaattgtttgtcttggaagtagccggagcgatttagcattgcccatggattttcacggaatgcatttcctgctacaattttcccatcttctgcattgataacattgccgtattgatctgtatatccttggtcattgtaccattttgggaagattccttgcggtaatgtgactagatttttatagatattttcggctccgctgccagggccattctgactttgataccagccatacagatttacatccagttgggtagtgcgagttacggcaaaatcgatattggaacggatattaaaccgttcagcagagtgattggtattataatcatgtgaattatctgtattgaagtagccattgttacgagtatacattgcattcacgaaatatgtacttttttctgttcctccttgaatattaagattatagcgttgactccatcggatatccttcaaatatttatcagcccaatctacattggggtataatatggaattagggtcattctttgcataattcattatatcatagttcgaatacaggggatccatattgtcattatgacgggctatgttgtgctgtcttgcataatcggctgcgtttaatgactttaactctttaagtggttgttgagctataatttgagctgtcaattcaacctgcggttttccctttgctcccttacgagttgtaaccagaatagctccactgcctgcacgcattccatataaggctgttgctgcagcatctttcaatacggtaattgattctacttcgtgtgatgacaaaacagcaaaatcccgttcctgtccatcaaccagtactaatacatcgggcgaattacttctttgtcctcttatccagaatgaattctgttcattcactaatccaccaccttgcacttgtcgggcaaaataaccaggtaccagtccggctaatactgccgaaagatttgtaacaggtagattgcgtaactgtttacccgagattgtgtaggctgaaccgttataatctcccatagggagtacacgatatcctaaatccaagggtacatcttctttgttttggacattttgtgcctggcatatcaaatagccaggaagtagcccaaccaacaacattttctttaagaacttcatatgtacaatttttaagttaacgtcatagtaattttattgattattttgaactttatccattaacaccttcatccagtatcctccgatcaccgaacgggctctgaagcctacccatctaccgctgtctgtatggtgccagtcgctgataggtacacgagagactgtttcattgatatatttatagacaggatcagagaatttctggaaagtttccttatctgaagacatagctgccgtccacatgatccagtcggattttgtgtattctttacgagagtccagagggagcccataaggattctgttttgtcaaataatagttaatctcttttctgataacattattagggaataaattcaggttccacaacttatcccaaaccatgttatatttttgactccaggtatctttacggtcaaaagccaaacggtaatgatctccctcattcgccatttcttcccatttcaccgccattttcttggctatagccgcatatttgtctgctacatcattcaatccgagcatccgagccatctcgctgtatccggccactcccatgatcgcttttacagaaagattggcattgtgtgcccaatgtccggcaaaatcatccgtgcaaagttggttttccgggtcctgtccaaactaacaaacattactgtatctatttgataatctgaatattataaattagcgtattgttactgtgttgtgctttacatctttttcaagtaaaattaaagtgatttttctctcaataaagtcacttattttcattattctattttctttcggatgaactctaaaaatggcgaaaacatcaataattaagtattgcaaaattggctgttcttaatttatttcatatttttgcaacgacggttgactcaacagccgttgagaaaaacttattgattatgaagttttataatagagagaaagaaattgcagaattgaagcgtgtacaagagcttgcatttggtcaaaattccagaatgattgtggtaacaggccgtaggcgtattggaaaaaccagtcttataaaacaagctctgaagggaacacctactgtatattttttcattggaagaaaagcagagagtatattagtcgcagattttataaaaatagtacgcgagacattatctatttttattccggatggcatatctaactttactactttgatacaatatcttttcgaaataggaaaaacacgttcttttaatattgttattgatgaatttcaggagttttataatatcagacccgatgtttttagtgatatgcaaaatctttgggatgaatatcggcaagaaactaaaataaatcttgtaattagcggctctgtatattcattgatgcaaaagatattcacggatcatggagaaccattattcggacgtgctgacaatattttatgtcttcggtccttcaatacaaaagtgctaaaacaaattatggaggattttgcgcccggatatagtaatgatgacctattagctttgtatacactgactggaggaatccctaaatatgtagagttattctgtgacaatcaagcactttctgttgatcggatatatgacttcgttttttcagaaaattccttgtttatagatgaaggacgtaatttgttgattactgaatttggaaaaaattatggcatttacttttccatcttattagaaatagcaaatgggcattatacacaaggggaaatagagtcagtactaggggggatatctatcggaggtcatttaagtaaattagaaaatgtgtataatttgataactcgcgaacggcctatttttgcgaaaccaggtactaagaaaaatgtacgatatattattggagataattttctaaatttctggtttaaatacatcgaacggaatcgttcatatattgaactacagaattttgaagacctgcgtcaactagcaaaggctgattatcagacttattcaggcagagtgttagaaaactattttaaacagaaattagcagaagaaggtgggtttaaagaaattggttcctggtgggaaactaaaagttctacaaacaaagaacgattaaactcttatgaaattgatattgtagctcttaaatcaagtggaaaaaaagcctttatagcagaagttaaacggatgccagagaataattatgttcattcaacgttcatggaaaaagtggaacatttaaggcacaaagagatggcaaaatacgatattgaaacacgagtcttaggattagaagacatgtaactttatgtaaataagatgacgcgattatccctaaaatccccagttacagcaattcaattagcttggatcccaatactcgttctatcgtcactgtttctacttttttgttatttgtaaatttaatcttaaagaatgaataaataagagatactcattcttcttaacttaaagccttttatttatatcaaattctttattatcatatccgcagcatactgtaagcaatttaaacagcctgtcattgaactcgatttagacaatgacaggctacttaattatttatcttatattgaatattaaattattgtcgtggttcaatcacgtaagtcgtttactgaatcacgcctaacttattctcttattttatggtatttatctgctaatccataaaatataattagattatcagactagttcttaatttttcattatttaccattcaatctgctgatcttcgtctggaatctgagtattgagatttcgttccagtagcattgttcctttaactttataaagaacttcttgatttcgagaagttacatctttaaaatcatattcaatagtaaatgaaacatagcgatgttttagataaggtcgtgtagcatccatagtttccgttacgctgtaagcaggagtaccgtatagcttaaatccaatcttttcttcgtcatctgcccacatactcaatgatttgtcttcattgaagcgtatatatattttataaagttcccgttcatctcttgataaatcttcgctcattaaaccggcataaaagaaaatagtattattatctaccacatatgctgtacgattattggttaccatcggtttattatcagtacttccatttgcatttcgaatatacacttccattgtacttgtactatatgaaccggaataatcgttaaaaggaattacacgcaataatgcttttgcatagtttttacgtggatgaccttgataattataagaagcatcatcaacgatagttagaggcaacacccatttatctgtcatattgattcctctcaaatcaaaatcaatatttagttgttccacacatgttcctgcaggaatatgaactatttccgggaattcatatttatcttcctccaatagcgtataccataaatctgtacgcccgctgaaacgttctctatttaatatttccaaggtatcctcatatagtgctacatggacatctatatcttgttcgttcgtagttgacccactaactataaccggtaactgatagcgtacttttccatcagggttgtatctcacatatattggagttaccccattatctttatcttttataggtgctttaaaagaaatatattgccgatactgctcatctttccactcatcattacaagaagtgatcaagagcaacatacataatgcaaaccaacaattatatataattttcatacttatatcattttaaaattaatcattgtatgtccaacccggattttgtgtcaacagcttattgcgtttcaactcctcatgactgataggccagaaatataatttgcgagaaaaagcagttggaagttcattgactacaattggtgaatgaaacgctgctctattttcttcagtcataagagcatcacaaccatatatttccattgactcttcaatcggagcgtctttccatctgcggagatcaaaataacgatgtccttctcccatgagctctatctgtcgctcatgcttcaatttcttacggaatacattccggtcttgatactctggcaatgtataatcgggaacccctgcacggcaacgaacaggacgaataccttttttcatttcatttatgtcacgtttgacagaataactggcagagccgtcccaagatggaatgtcgtatgaagatccatcttccaactcattcaaagcttcagcgtaaatcaataagatttcagcaaaacgaatagcaggttccgtttttagtttgacatagtccttattaccttttgccgcagaggtatcgtccggatgaacaaatttcatgattccaataccagtgcgaagccaaaaattggagttagtatatccattaccattaccacgataataaaatacctgttgctctacgggtttaggatctttaagcgttgaattattcaatagaggccatacgcaaccattaaaagcaactgaagcatagaagcgtggttcacgccatgcatactctttccatactcctttctttaaataaggatatgttcctgccttcccttccttttcagacacaaaacggttctcaacttggcaagtgtccaaaaatgtctgtctgttaaactcagagccattatacatatagtaagcatcacacatcttttgtgtcataccatgtgtattccagccattggcactggtaggcaattgatgtaataccatatctgcaagattgcggtcaccctgattttgtccacgactaaaaataagttcaggattatcaaacatagacagggctccattaaaaacttgtcgataggattcaaaggggtcaatatcccgatatccatttggccaatctgcattttcaaaatcattatcagaataaggaggaagtgtcttcggataacctgcagcggcttcatctcttttcttcacagtgtgtaacacataacggtgtccataattgcttcccgggagttccataacgtctcttgctgctgcagcggctttggcccatttgtattcattatattcctgtgctaacaaacatcttccgtcatgatctaccaaatctgtaaatctttcggtatcttcaggacgagggttattaataggacttgccgcgtataatagaacttttgcgcgtgctgctaatgcggctcctctagtaggacgagaggtatgattcgctcccctgtccaaaggtaagtccttagccgccaagcgcatttctgattcgatatattctacgcattcatcataggaattacgttgacaagccaaatcatcatagctggctgtataatcgagtccttcctccggcaataaaggaacagggccatatttacggagtaataaccaataatagtaagcgcgtacaaaacgggcttgtgctttcaggtcagctctttcagcttctgtaaactccatattcatgtcgatattttgaatgaaaatggatgcctgacgaatgcctttataactggctccccatgattgtcggtctccttcactataagtccctgttttaaaggtgttataaatatcacggtcaccaaaataaatatcatcggcaaaacaccacagtatattatctttggttccaacatccatattctctcctttaagataggaataagcatgagctaaccattcttccgagtatttttcattagtaaatacatcttccagcgtcatacggtctttaaaatttttatccgaatccagctggtctacacacgaaacggtgattgtccctaacagggcacctatacaaaacttatatatctttttcatttcacacatattgattagatattaacagtcaatcctaaagtcattaccctagacagtgggtattccgcccctgtggaacttcctaattccggatcccattctttaaatttagcgaatgtcaataaattggtaccaataaagaatacacgtatattattgaacttaatcttatttacaattgatttaggcaatgtataccctacttctaaagtcttcaaacgtaaatatgaaccattttttagccagaaagtggacttttgttgattattatcatttccaccatagctaaggcgtggataagaagcattcggatcttcattagcaggaattccaagtttagctgctgtgtctgcatcaacccaacgattagctactaaatttcccaaaacatttccccactgactatccttgaaggcaaataccgtagaaccattaatgaagaatgaagactttcctgctccttgaaaatggacattgaaatcaaatcctttccattgtgcagagataccaaatccgtaaatcagattcggtttggtagtcgcaccgatagctactttgtcaccatcattgattacaccatctccattaacatctttatatttaatatcacccggttgtacttttccccatgctgtctgttgaggactgttacgaatatcatcataatctttaaaaagacctaatgcaatcaaacctttagcttggtttacacggtaacccgcttctgtctggtaaggataaacagtattttcttcatccttctccaatatctcatttttactataagtaaaattaccacgaaccgtgaggttcactctgtttattttctgtttataggcaaaatggccatcaaaaccttgcgaacgtacactacccacatttgctttaggattacttctcacaattcctactataccaggtagatatttacgttccatataaataccatcgcgttgttcatggaaatagtctacagtggccgtaaacttatcattaaacaaagaaaggtctacacctatatcgtgctttgttgcaatttcccaagtaacgttttcagaagctaattgagtatatgccataccatcataagaattgccataaccataatcaccccaattccaaccaggaaaggttatgtccttatcattttctttatatgacttagcaattgtatatagataaggaaaacgttcacccaatttatcattacctactttaccataagagtaacgcagcttgaacatattcatccattccagatgtttcttaatgaatttctcttctgcaatgttccaagccagagaaaaagcggggaagaatccgaatcgatgtccatcggcaaagttttctgatccgttataaccgaagttaaaatctatgaagtaacgataattccagttataactagcacgtcctgccaagcccatatgacgtttggcaatgccgttctttatatctgtaccaatatctactgtagtccgataagcatcttggctatattttaaagtaccacctacgtgatgcgctttgaatgcacgattgtagtgtaaaattgcttctaaaaattcagttcggttacctgttgaaatagagctttgagtcattttttcttcggttcgctgttctttaaaagtaatttccccatcagtatttcgaaaacgttctgcgcgccatgtttgaggcatttttttacggctaatttcgtttgtgttgttagtgtcgaaaccaaaacgaccttcaaaacgcaatcctttagtaataaaatccagcttctgttctaaagaaatattagtctgaaccttattttcccagatttcaaaatatccagtttgtgtagccaatacccatggattggaacgatcatcttcttttccaaatgctggtacataaccattggaatacattactggaatactaatcggactttgatttattaacgatgcccatacatttccaccttgtccaggagcattacgtttctttaaagaaccggaaacaccgactttcacaagagttgtttttgtgatgtcaatatcggtattcaaacgataattccatcgttgactaccgggattggtattataatctttacgaactgcttcatctgtcttatacataccttcttcactaatatagctaagcgaaacaaaataacgtgctgtactaccaccaccgttcatattcacattagcacgataagtcattgctccatctttcaataatacatctttccaatctacatttggataaagatcaggatcaagtcctaaacgtagaatttccaattcgtcattctgatagatcggttcttgattacgagtaatacgtgcttcattcatcattctagcatgagtgtacccatctacaaattccggtgtgatagtccgtgtgttataagatgtttccactttagcactgatattgattttaccagctttaccatgttttgttgtaatcaatactacaccattagcaccacgaggaccgtaaattgctgtagtagaagcatcctttaaaacagtaaacgattcaacatcctcaatattaatttcatcgagactacgctcaaatccatctactaacactaaagccgagttatcagctccgaaagtagaaataccacgaatccagaattccgaagtattttttccaggctgaccggatgtctgcatagctagaacacctgccacattaccagccaaagcatttgaaagatttgctgtcggatttgctttcagatcatttacattaacggtagtcaccgctccagtcactgttaacttcttttgtgcaccggttcctgtaataacgacttcatcaagctcacttgcttcagattccttcataattacattgactacctgctgccttttcactaatacttcctgtttatcaaaacctatgtacgagaatactagtcttgaaaactcttcaatactaattttataacgtccgttaatatccgtaattgctcctaagccagcctgatcttttactgttacattgacaccgaccagtggctctttattcgtatccgtcactactcccgttacttcaatttttttctgcgcaaaagtggcaacagaaaccagtaacaaacaaatggtgataaaattctttattttcatgtgttttttcttttattcggttattgttctccctcttccggttgactctcttccggatgttcttctgtcgcttcaggaatcttttctaatgctatcttccggatacgatgattgttcacatcacccacataaaaagtttctgtatcttcatcataagctaaagcataaggataattaaaacgtgcttcatcacgtaaatggccatccacatatccattagcatgtacattcattcctgtgcttcctcttccggcaaaagtagagactactccatccggagtcaatttacgtatacagtgattattacgatccgtaaaatagaagtcataacaatcctctttattcgcatcctcatactctttgttaaatacgaagactccctgtccgggtttattcaagcgtgcttttgttcctgccaaatctttataatccgcttgtccgggttgtccacaaacgatatacggagttgtaagccgcttgttaactctgtcataatttgaacggagaatatagtgctgattctgtaccatcatataaacataatcaccagatggatgaacgataaagttaaattcccagttggcatcctgaatcgtaaacagttcttctgcatgagctttattatcatttgccccccattggtaaaaatcatatctgagcacagcccctgaaccaaagaaattatagtataattcaccattttctgggtgtatcattgagttctgacaccctctacttgtggtcagacgttttactacaggattctggaaatctgtaacatcaaccatatcattgtcttggttacggattaacataatattacttgcagcattatcagctccttttgagcatgctataatcatagtatctttacttaaagtccatgacatgctacgcaagcggtcggctccttccgaactaccggttattccagtgtatattctttcatttttcaaatccaatatacgcatcggcttaccattaccattattttctgcatcctgagttaaatacaggatatcgtgatttttcgggtcaaactcgaaccatgcaggaaaatctattttaccacagtcgctaaaaggaccttcctttataatttctccattacccttctcatctacatatccacataaagttgatacgaccttttgtggaacatatttatattttgatgatactataacatcctgttcaccgacttttacttcaatagttccttcgtaacattgttgcggggtaatacagtacaaactattacctttcgcattaattacttttgcttctttcccgcctattttcacaaagacaatagaggaatcagtaccgaaattactaccgtaaataatcattcgagtgtttgctcctcctgctttgggagcaaaatccgtcacagtcaccggttggctgggatcataaggttccgcagacgcatctttatcatctttacagctactgaagcaaatcgtaaagagtaataatagagtcatccattgaaatccaatgatctcatgtctcatagttttacatttcataatacactagatttaaattattgattattctgaactttatccattaatactttcatccagtatcctccgattactgaacgtgctctgaatcctacccatttaccgctgtctgtatggtgccagtcactgataggtacacgtgatactgtttcattgatatatttatagacaggatcagagaatttctggaaggtttccttatctgatgacatagctgccgtccacatgatccagtcggattttgtgtattctttacgagaatccaaagggagtccataaggattctgttttgttagataataattgagctcttttccaattacattattaggaaataaattcaggttccacaatttgtcccaaaccatattatacttctggctccaggtattcttacggtcgaaagccaagcgatagtggtcaccctcatttgccatttcctcccatttcaccgccattttcttagctattgctgcatatttttcggctacatcactcattccaagcatacgagccatctcgctgtacccagctactcccatgatagcttttacagaaagattggcattgtgggcccaatggcctgcaaaatcatctgtacaaagttgattctccgggtcctgtccagactaaactttcatttatcaatcatttgaaatacaggtaattatctttagtctatattgtctttgtgttgttatggctattaaatgaagtacaaaattctaacttatgagcagacttttaataaataaaaagttaatggataaatgtagtggtagtctaagatgagaaatggactaatctgaaaaaaatgaatatttttcctctctctcttttcatttatccatgtaatttcttttatgacataaaaactagcaacattttaagatattaaaaatcaaatagattgaataattactcttgttgaatgaattcgacgtaaataaagctttctggaatgatttatctatctttttatactattttgcagagaaatgttattgtgtgatagcttaaggtaataaggaaagtagatgttagaaccccattcaggagtccatagtgtggtttattttaaaccaataagtagtttcttttaaaggtaggagatgttccttttaaaccaacgacttgtttcattatatcaaaacatcttttcgatagtaagaaaaagtacatattcataaagaattatgctatatatattcaataaaaagaatatatatgatgtaaatgtgactttcttttttctatttagcaactcaatagaatcttaattcttctgcatatatgaaaaatagaacataatttgaaataactaagatgaaatatttcaatctttacctggcaagtttagctcgaagttcttttagtctttttgcagcctgtagattatccacctttatatatctcatgaatgcagatggactcttatgcccggatatgcgcataagttctccggcaggaaagccggataaatacatatttgtgcaaaacgatcgtcggcaagtatgagaagagatcatctcccatttttcatagactctcttttcccgttctttcccttttttgcgaacaacttcgattttctgttttagttttgctcttcgccctaattctttaaccctttcgttgaatatatatctaggaattttaggtaaatcatagttgtacttcttgagtatttccggaacataatcgatcatagggattatgacagctttatgcacttttctctgtttgagatttataatctcattatctaagtcaatatgttcgggacttaatgttgagagatcactatatcgcagtcctgtaaaacacccagtaataaaaacatctctaatctcttccaattgcttatcatctgacaagtctaactcgtgtattgttgaaagttccttttcacttaaataaatagcatcagtttcttcttctacgaccttaaaatgcttcaagtcaattggaggaataactcctttatctatttgataattaacaaatccctttaacaaacgtataatttttcctgcagaattagtgagcaagccaacactcccatcgggctttataaccttataaaataaatagtccatgaattcattgtaaaatataagattcaggttatgaaaagtaattggctgcgatgaatgttctttgaaagcgatcagatgtttacgaagtgttcggtagtcttttatttggtctgcagaaacaacaagagctttttctgtaatatatctttctaatgcgtcaaatatatctacccgattaggacgtaattcatattctctatttttttttaattcaagtaaaacaaaatctacggttggacttattccgtttatcttagcatatgtaagaatttctccaagcttggacgttattctaatcaggcaggcatcaatttcatcatagtttggacaagcgcgcttaatccatctctttttagaatcccagtgttccggtttaatactgtatccagtagagatgagcgtacgcttagtccgattgtagttatatcgaacataaaggacagtagtcccttctcgagtgacgtacctaggtttaatatatggagtatattttgcgatagtaaaatctgtattgctttcgtattgcaaagttacaaaagctatccgaaatgagcaatatctcatcgttaaaagctagaacctccaaaagcatagtactatctaaaaaagtggataaatattgctcaaaaaggaaaaaaactactcaaatcacactgtaggagagttattttgcactttaaaaacattcgaaacatgaaaaaagaatagattttgtcctttcttgaacacagattttcctaatatttagcattaattccattattttgtagcgttacaaataaaatgctatggaaaaacaaatggatttgtatgaatcctgggtcctacctgaaacacacaattctatataaacttttcctctagcatttataaatattcgacagtactgattttaatatattatttaggtatagcgataagaaaggtaagattgcatttaaaaggtaatagtaagaaggtaaaaagagaaataaaagaaaacgtagggtttgtttttctttataggtaaacaagattgtagatgggtaaccttaaaattgtagattaattagaaaatatttatgaagaaactactaacagtaatggccttttcggtcggtttattcgcaaatgctcaaaccggcaacttatttaaaccagtaaaagaggtagcgctacgtactccatcggtacctatcgttgtttcagatcctcacttctctatctggtctccttatgataaattaatggaaggaagtacagaacactggactacagctaagaagccattagtaggggctttacgcgtagatggtaaagtgtatcgtttcctgggtaaagatcaagtagctctaatacctattgctcccatgacaaatgtggaacgttgggaggctgcatatactaatagtcaaccagcaaatggatggcaagaattccagtttgatgatagtagttggaaaaaaggtaaagcagctttcggtagccgtgatatgccacgtgttcgcacagaatggaaaggagataatacagatatttatatccgacgtacatttgaaataaatgatttggatttaacagagaatatttttcttatttattctcatgacgatgtattcgaattatatttaaatggagaaaaactggttgctacagatctcgtatggaagaataatgtaaatctaaaactttcagacgaagccaagaagaagcttcgtaatggtaaaaatgtgattgcagcacattgtcataacacgacaggaggatcttatgtggattttggtttatatcgtgaaaagaaaaatgcagtaacatttgaaaatgaggctgtacagaaatcggtagatgtactagccacttccagttactatacattcacttgcggaccagtcgaattagatgtcgtatttacagcacctcaattgatagatgacttggatttgttgtcaactccgattaactacatctcctatcgtgtgcgtcctcttgataaaaaagagcatgatgtacaattctatatagaaacgactccggtattagcagtgaatgagactactcaacctactattgcacgtacattatcgaaaaatggtattagttatgtagaagctggcaccatcaaccagccgatatgtgatcgtaaaggtgatttgatttgtgctgactggggatatgtatatcttggtagtgtaaatggagcaggaaaatctataagtttgggtgactatagcggaatgaaggaagcttttgttaaaaatggaactttagcttcaagtaaaagcaaatggattactcgtcgggaagaaaatactcctgcaatggcttatgtacataattttggaactgttaccaaagatggtaaagatggtttcttgatgatcggttatgatgacatttattccattgaatatatgtatgagaaacgtatgggatattggaagcatgatggtaaagtaacgatttttgatgctttcgaaaaactaagagataactatcaatccatcatggagcgttgtcgtgcacttgatgagcttatttatagcgatgcagaaaaagctggtggtaaaaaatatgcagaaatctgttctgcagcctatcgtcaagttatttctgctcacaaactatttacagacaaagaaggcaatctgatgtggttctctaaagagaataacagtaatggttgtatcaatacagtcgacctgacctatccgtctgctcccctgtttttggtctataatcctgatttacaaaaggcaatgatgactagtatctttgaatatagtgctagcggtcgctgggataaacctttcgcagcacatgaccttggcacttatccaatagctaatggacaagtttatggtggtgacatgccgattgaagaaagtggtaatatggtgattctaactgcagctatttcgaaaattgaaggtaatgcagattatgctaagaaatattgggacattctaacgacatggaccaattatttagtagagtatggacaggacccggaaaaccaactttgcacggatgacttcgccggacattgggcacacaatgccaatctttctgtaaaagctatcatgggagtggccggatacagcgagatggctcgtatgctcggattgaatgatgtagcagacaaatatgcggatatagccaagaaaatggcagtgaaatgggaagaaatggcgaatgagggcgaccactatcgcttggctttcgaccgtaagaatacctggagccagaagtataatatggtttgggacaaattgtggaacctgaatttatttcctaataatgtaattggaaaagagctcaattattatctaacaaaacagaatccttatggactccctttggattctcgtaaagaatacacaaaatccgactggatcatgtggacggcagctatgtcatcagataaggaaaccttccagaaattctctgatcctgtctataaatatatcaatgaaacagtatctcgtgtacctatcagtgactggcaccacacagacagtggaaaatgggtgggcttcagagcccgttcggtgatcggaggatactggatgaaggtattaatggataaagttcaaaacaatcaataatttaaatctagtgtattatgaaatgtaaaactatgaaacatgggaacatagggctacaatgcatgatgttggtattcattttggcagtctgttttagtagctgcaaagatagcaaagacgatacatcagcgccttatgatccgaatctgccagtagaagtgacggatttcacacctaaatcgggaggtggaaagaagaaaatgataatctatggtagcaactttggaatagattgttctattatttctgttaaggtaggtggtaaagaagccattgtcattagttctaaaggtaccagtatctactgctccacgccggagagctgtttcgaaggaactgtagaaataaagataggtgaacaaactgtgatagcatctgaaaaatatcagtacgaaccacaaatggtagtaacagacttatgtggtgatgtagatgaactgggagagggaaatattgtagacactggtccgtttgacgattgtggaaagatagactatcctttttggttttcttttgatccccaacattctaatattctttatttgtctcaaaataaaggaaatctgagagtgttagatttggaaaaggaaatgatctatactaaggaactaaataatatcaaccgtgcaactactattacatggactaatgatggtgatatgatattggctgctccccagaatggtggtgctaagaatagaaacaatattattttaaagcgtggaagcagtacagacggacaagatttcaaagagtctagttgggtcgctttggcgcgtggtaatgcttgtaacgggtctatggtgcttccacaaacgggagaactttacttcaatcatcgtgcaacaggcaatgtgtacagatataattttgaagaaaacggctataataacaatccggaagttcctggtggagcagggttgaatgactttttggcatttagtgtacctaatcagacggttgactttagtatggttcctcatccaacaggtaaatatgtttatatcatcatgcatgaatcgcattatatacttcgttccaattatgatgaggagactaaaaaactggtaactccatatattgtgtgcggacaatccggtcaggctgattataaggatcttgtaggtatcaatgcacgcatcaataaaccaggtcaaggtgttttcgtatttaacgaggagtataaggctgctaataaggatgattggtatgacttctatttcgcagataaagagaatcattgtattcgaatattgactccggatggggtggtttctacgtttgccggacgcggttctgcctctgcaagtagctataaatggggtaagcaaaatggagaagtacgtgagagagctcgctttaatcaaccggtagctttggcttacgatgaggtaacaaagactttctatgtgggtgattcgggaaattataagatccggaagattgctaaagaacaggcatctgacgatttagttggagaagaatctaatgacaatcaggaccaagaaaatcaataaaaagaagaacacatgagaataaaagaatttattacgatttgtctgttattagtctctgtttccctttttgctcaagagaagactattgaggtaacgggagttgtgacagatatgaataaagaaccattggttggtgtcaatgtaacagtgaaagacaaacctggtttaggagcgataacagatatcaacggacgttacaagataaacatagaggaattttctcgtttggtattttcgtatattggttttgatacacaagaaatattggtgaagcaccaaaatctggtcaatgtgtcaatgaaagaatcggaggctagagaaattgatgaagtagtaattacgggaacgggtgcgcagaagaaattgactgtgactggtgcagtgacgaatgtagatgtagaggtgctgaaatcaaatcctacggcgaatctttctaatgcattggccggaaatgtatcaggtgtccttgccatgcaaacttctggacaaccgggtgtgaatacttctgaattctggattcgaggtatatccacttttggtgctaatagctccgcattagtattagttgatggttttgaacgcgatttagatgaaatcaatattgaggatattgagtcttttactgtattgaaggatgcttctacaaccgcgatttatggttctcgtggcgcaaatggtgtagtgttgattactaccaagcatggtaaagaaggtaagattaagattaatgctaaagtggagacttcttataatgcgcgtaccatcacaccggaatttgcagatggttacagttatgccatgctgatgaatgaagcatgtataactcgtaatcaagagagaatttatcagaatgacgaaatggaaattctgcgattgggacttgacccggatttatatccgaatgtagactggatggatgtcctgttgaaagatggagctatgacttatcgtgctaatctgaatatgagtggcggaggtagcacggcgcgttattttgtatcgcttagttatgtgaatgaagaaggtatgtacaaaacggatgatgccatgcgtaaggattataatactaatcctagtagtcaacgttggaattaccgtttgaatacggatattgatgtaacgaagactactcttgtaaaagtaggcgtatccggttcattaaagaagcgtaatgcaccggggcagggctctaacgtatggacttcattgatggggcagagtccaatcagtattcctgtgatgtattctaatggttacattcctgcacacgggaaagaagataatcgcaataatccttgggtacttgctacacagagtggttataaagaaatctggaataataaaattcagaccaatatttctttggaacaaaagttggattttatcactaaaggcctgcgttttgaaggacgtttcgggttcgacacgaataatcagagtgaaataaaccggataagaatgccggaaacatggcgtgcccaaagagatcgcaatgatgagggaaaggtgatcttcaaccaacaaagtgccgaaaaaccgatggagcaaaccagtgcctctactggtgaacgccgtgaattcctggaagcatttttacaatataaccgtgcatttcacgcgcatcatttgagtggaacattgaaatatagtcaggatgcttatcggacaacagttgatattggaacggatgtaaagaatgggattgccaaacgtcacatgggattggccggtcgggtaagttacaactggaactatcgctattttgctgactttaactttggctataatggttcggaaaattttgctgatggacatcgtttcggctttttccctgcgttttctctcgcttggaatatagcagaagaaacgtttataaagaaacatctgaaatggatgaatatgttcaagttacgttattcctatggcaaagtgggtagcgataagcttaaaataggtgatacaacatatcgttttccctatttgtacacaatcaaggatgatggaaatggctggacttggagtgattacggttctccggacaatgtgtatacaggaatgcagtatacgcagctggcctccaacaatgtcacttgggaaattgcgaccaagcacgatgcaggtgtggatttatccttattcaatgacaagtttacggctactgtagattatttccatgaacagcgtgatggtatctatatggaacgtaattatctacctggcattgtgggtgtaaatacttatccaaaagcgaatgtgggaagtgggcggtcgaaaggttttgacggtaattttgcttacaagcagaaaataggtaaagtcaatctgactgtacgtggtaactttacttacagtaagaatgagattctggagaaagacgaagaaaatgcagtttatccctatcaaaaggaggctggttacagggttaatcaggcgaagggattaattgctttgggattgtttaaagattatgatgatatacgcaatagcccgcagcaaactaactgggggaaggtgcaaccgggtgacattaaatataaagatgtcaatggagacggaattattaatggcagtgatgaggtagctattggtgcaacaacgaagcctaacttgatttatggttttggtatttctgcacagtggaaaggcttcgacttcaatgcacacttccaaggagcaggcaagtcttcgttcttcattaatggccctaccgtatatgcctttaatggtagtcagtggggaaatgtcctgacgaatttggtgaaagaccgctatgtcgatgcggagacagctgccacattgggtattccggctaatgaaaatcctaatgcttcgtatccccggcttagttatggagggaacgataataactatagagcttctacttactggctcagggatggttcttatttacgcttgaaaacattggaagtgggttatacattaccgaaatcgattgtgaacaagatacggtttaacaagatacgtgtctttttcattggtaccaacatcttgacgtttgctaaatttaaagaatgggacccggaaatgggaagttctaacggagaaaaatatccgcttgctaagacatttactttgggattaactgtgaatatctaattaaatgcatgaaaaatgagaaagatatataaactgtatattggtattatattgagtgtaattgccgttgcttgttcggataacctcgactcagataaatattttaaagaccgccggtctttggaggatgtttttaccgacaaggaatctacggaagaatggttagcacatgcctattcctttttaggcggatacaatttggaagtgtctaacatgcttaatacaatcactaactttgccgatgacatttacttcggtggtaatagtctcgatgcgtataagacgttcaagaccggtacttatgatgagagttaccgtcattcgtggggcgatagttataaaggtattcgtcaagcatctatcttcatccaaaatattgatatgaatacgaagtatacggaagaagagagagctgatatgaaagcgcaggcacgttttgttcgtgcttactattattggttgttacttcgcaaatatggtcctgtacctttattaccagatgaggggcttgactatacttccgattatgatgatttggcaattcaacgtagttcgtatgatgaatgtgtggaatatattgaatcggagatgcgtctggcagccaaggatttgcctctgacccgagccattaatcaggtggcgcgtcccacacggggagcagcattggcggctcgtgccagagcattgatatattcagcgagtcctatcaataatccccgtccgggagatccggataagttctcggatttggtagactatgaaggaaattgtctgatgtcccaggaatacaatgaatataagtgggcaagagcagcagctgcggcaagagatgtgatggaacttcccggtgagaacaacggtcatcgttatgaactctaccacaaaaaggcaactaacattgctgaacccggatatcctgctaccattaccccttatcaggatggtgacttctcgacaaagacatggaacgaaggtggctatagcgatatagatccttacgaatcctaccgggcagttttcaatggttcgttagcgatgtatcagaacccggagttgattttcagccgtgggcgtaatcaaggggtcaatagtattgctgaaatggtgaaacttcaaatgccgaaaactttgggtggaggaaataatgcttatggtatgacacaaaagatgtgtgatgcttattatatggcaaacggagacgaattcagtagagaacattttaaagaagaatatccttccggtacacgttttgttaccaaaaaggaagttgaggcaggcacatatcctcaaataaaggaaggcgtatataaggaatatgcggatagagaaccgcgtttttatgcatccgtttcgttcaatggctgcgtatgggctttgctgaaaaatgcagagacaacagattataagaatgacgttgagaaacaagttaactattattacggtatcaatactgacggtttctctggtaccggtgtctatttacgatccgggatcggtatcatgaaatatgtgcatccagacgatacgaatcgtaaggaaatcaaagcgaaagcagagcctgccatccgctttgccgagattctgttgatttatgccgaagcgttgaatgaactggaagatggatcttcgtacgacattccatcgtgggatggatctaccagttattccgtcaaacgtgatgttgatgaaatgaaaaaaggcatcagacaagtacgtcgccgtgcgggtgtacccgattatacaatgccagagtaccaggaccgggatgtattccgtaagaaactgaaacgtgaacgtcagattgaactcatggccgaagggcagcgttattttgatttgcgtagatggaaagatgcagaagtggaagaatccaagaaaaattacgggtgtaatttctatatgtcggatgtagaagagcagagagaacaattctatactccgattgaaattgcagacttacctactgccttctcacgtaaactctatttctggcctatcagccacgatgagttaaaacgtaataaacggttgacgcagaacccgggatggacatacaatgattaatctcctaataagaatatgatatgaagaatatatatatttatttaagtttattggctgtcatcgtcttgggaaccgcttgtaataatgagtgggaagatgagcagtatgaacaatacgtatctttcaaagcgcctatcgcttcaggaagcgatggtgttactaccatctacgttaggtataaggacaatggaaaagtgacctatcagctacctatcattgtcagtggctctacagtgaatagccaagacagagatatacatatagcagtagataaggatacgctgaaaacactgaatatcgaacgttttagtctttatcgtccggaattatggtatacggaaatggaggaagacaaatatgaatttccagaaacagtacatattcctgccggttcgtgcgtagaactattaaatatagatttcaatttgcaagacattgatatgttggaaaaatgggttttaccgttgaccattgttgatgatggatcctatgcttatcaaagtcatccgcgcaagaactatgcaaaagctttgttgaaggtagtaccttttaataattattccggttcgtacacggcttcttccatgaaagtgtacacttatataaatggtaagcctgatacgaatgcaagaacgacggacaagcgtacaggatatgtggtagataacaattccatattcttttatgccggtttgattaatgaggatatggataaggatatgcgtaagaaatacaaaattaatgtgcacttcaaagaagatggaacattggatatgaagcaggatgatccaagtaacgaaatggagtttgaactgattgggacgcctacttatagtagtacttcggttatggacgcgacacgcccttatttggaacgtcgttatgttcaaattatgtttgaatacgacttccaagattttacttatggaggtagtggtacagaagtaattcctatcaagtatagagtagcaggaagtatgacgcttctgcggaatatcaatacgcagattccggatgaagaccagcagattgaatggtaataatatagataatgaaatagggaagatatggaaattatatcttccctatttacttgtaatagatcctgattagttacttccatctctgtttacctgtttttttcctttattgatttgtatttttccctttctcttaaaaaacttacttacttttgttctgtaagtcagtcacacgaaaccgacaaaaagcatagttaattaaatcagaataattatgaacatcaaaaaacatttgccttggttgggagctttattacccgtggccagtatgcaggcagagacaaaacccaatgtggtcgtcatctatgtagatgatatgggaatcggagatatcggttgttatggaggtaagtttgttcctactccgaatattgataagatagcgcaggacggattgttattcaatcagtattattcatccgcaccggtcagctcaccttcacgttgcggattgacaacaggcaaattcccgattgaagtaggaattaatacctttttaaataataaagccagcaacaagaagtgtgaacagcgtaactttttgagtgacaagaatccttccatggcacgtgctttccaaagtgcaggttatgccaccggacacataggtaaatggcacatgggaggcgggcgcgacgtgcacaatgcaccttctattaaaaattatggttttgacgaatatatatcgacgtatgaaagtccggacccggaaccggcaatcactgctacgaactggatatggtcggccaaagacagcgtaaaacgctggagacgtaccgagtactttgtaaataagagcatcgactttgtcaaacgtcataaagaccagcctttctttttgaatctctggccggatgatatgcatactccttgggtaccggaatttaagcaaaaggataacaaaagctggaatacggaagaagccttcatccctgttcttgctgaaatggacaaacagatcggacgttttatcaaagcattggatgagttgggattgtcggaaaatacaatcgtgattttcactagtgataatggaccggcgcccagtttccaatccgctcgtgctgcttatttaagaggaacgaagaacagcctttatgaaggtggaattcgtatgccgttccttataaaataccccaagaaaataaaggctggacaagtgaataatgagagcgtactgtgtgcagtcgatttatatccctctttatgtgcgatagccggaattgaaacagagaaaggttatcagggagacggacaaaattatgataaagttcttttgggcaaatcgaaagctaaacgtaaaacggatttgatgtgggatttcggtagaaaccaattctttaagaaaccgggaaatgcaaacgacagaagtcctcatctggctatacgcagtggcaactggaagctattgataaatagcgatggaagcgatgcgcagctgtacgatattgtaaaagacaaattcgagaaaaacgatgtggcgcagtcgcatccgcaagtcgtagctaagttgagcaaaaaagtatgtaaatggtttgcggaaaacaaagacaaaggaaaagagtaatacagtgaaaaacaaattataaactaatattaaacttatgaattctaaattattactattaccgaccgccttgatggttgcaggccattctgcagcagaggcgaaaggcaagaaatcggacaaacggcctaatatcttggtaattcttgcagatgaccttggctattccgatctgggatgctatggtagcgagattcatactcctaatttggacaaactggcacaagaaggagtacgattcaatcatttctataatgcaagccgtagttgcccgactcgtgcttccctattgacaggactttaccaacatcaagccggaatcggacgaatgacctttgatgctcacttgccgggctatcgcggaacactctcacgcaatgccgttaccattgccgaggtgttgaaagaagcaggatataccaccagtatggttggaaaatggcatgttgccgaaactcctctgcgtaaagaccaacgcgaatggttggcacaccgtgtcttccatgatacattctctgatttatgtcattatcccgtcaatcgtgggtttgattctcactatggagtgatttatggagtggtggattactttgatccgttcagtttagtagaaggtgaagtgcctataaaggaagtacccaaaggatattatataacccaagccctttcagatcgtgccgtacaggaggtagaagaatatgcaaaggatgataaaccattctttatgtacttggcttatacagcaccgcattggccgctgcatgcacttcctgaagatattgagaaatataaggatacttataaagtaggttgggaagctatccgtaatgcccgttatgaacgtcaaaagcagttgggtgttttcccgggaatggataactttttgtccgaacgtcagtttcatgacaaatgggaagataatccacatgcagaatgggatgcccgtgcgatggccgttcacgctgcaatgatcgaccgtgtagatcagggtatcggacaaattatcgaggctttgaaaaagaccggacagcttgataatacattgattcttttcttgtctgataatggttgcagtaacgaagactgccagaacatgtctggtggagagaacgaccgtccggatatgactcgtgatggaaagaaaatcatttacccgcgtaataaacaggtattgcctggaccacagactacatacgcttcattgggagcccgttggtctaatgtagcgaatactccattccgcttttggaaagctaaatcttatgaaggaggtatctgtactccgatgattgctcattggccgaaaggaattaaaaagaacgtgggtggcatgacatctgaaatagggcatgtaatggacatcatggctacttgtgtcgatttagcggatgctgaatatccaactacctataaaggacatgatattcttccaatggaaggaaagagcttacttcctatcttcaagaccggacatcgcaagggacacgactatctgggctttgaacacttcaacgaacgtgcttttctttccaatgatggctggaaactggttcgcccgaaaaataactctcaatgggaattgtacaatttgaatgaagaccggagcgagcaacatgatctggctgctaaatatccggagaaggtggcagaaatgtcaaaagcatacgaagcatgggctaagcgttgcatggtagaaccttacccgggacagaaaaagaaataactgtcattccatttaaaacggaatgaatagaaacattgaaagaataatggggatgaaggattccggatcaggaataacttcatccccattaataatatcggctatgaggttatctacaacaagaactattgctccgcttgcccgattgtagaatacttcatacttcctatttgtccatccttactcatcgtttccgcctgaataatcaccggagtggaatattggttattataacattcaatcacagcttttccattttcatctgtccgtacagacggattccagtagagcgtccgtcttttgtctactttatccatatacaattccttggtcgggtaggcaggtgaataatattccagtgcatgagtatatccctgaatgactgtttgccgggtaccaagtacggcagtctgacttttgttcaatacatcgcgtctgggtaggggaatcaggtagaaaacactgtatttatccagtttgctgatatccactcccgtactatccgtaacttcggacattttggtgttttgaatgatgtcgtcatcaatgcctccggttcctttgctgatgatgatagaagccagtccatccacttcggtcaacatcatttgagtttctgtctcggataaaatgtggttatccatgatatagcagattggtttctgccgataagtaagcttgtcattgctacgatcccaatcgaattgcggacttaacttttccattaattccggaatagttgtgacaatcttcccattgtcacgtaataaatctacagaacggcgtacgtcgtaataagcgtcaatgcttttctcattgattttagtagccatattacttccttgccggcgtttgcttttgatttccacttcatccaatacataaagtccttctactttccggatagaatccatgtatagagaatcaaaattctcggctttttgtagccagtgggtcaagtccttccattcaggatgaagctccttgtagccgtaggctcggggagcaggtgagaaattacggtcgatcaggatggatgcatccttgttgcgttctttaccgactttccgggtttggatcaccgcttccgtggttccttcaaagtcttctacaggaatggtgaaacgaccgttttcatcggtcacggttcctccagtgataaattggtcatctttcttcactatcacactaagcgctatatctttcagcttattcttgaggatcgttgatttaacctgcccgttcaacactaattgagcttccggtaactgcaacggagtgaaaggagcagtagaaatggcttggctcatgtcatatttacgccatccatgcaccattaataatatatccagttccgtttgcttccggggagacggcgatacaaaataataaccgggctgatggatatatccttttaaatcagatgttaacagcaaatcagtgaagatgttattgtcatactccagataatctgaccggacggcatcccggatgctgactgatacatctcccgataccggttctcctttggcattctttacctgtaactcacaacgaataggagcgtagggagtatacacctctttcagtccctctgcggatagttgtagaggagcacgtggattggaaaagacaaaacgctcgcataacgtattaccagctcggttgatgaggctgacttgcagtacacctgccggtagtttgcgggtaggcagaatgaactcttgtggagcgtccgcccggcaactaatcaattgatgaacatacggccgcccctgataactgataaatacagccaatgtgtcttgaggagtagcggtattgcaggatactttcaccaaaagggcaccggcattgttgacagtactcaacacatacccgttaggcaacgcctgtggaagggtaaattcatatttctttccttgaaaatcgactttggcaacagccggttgtgcagaaggtgtatattcaaaatgccccattccatcgtgcaaagtctcgaaagaagtgatttctgctccttctttggtatagagcgttcccgacaattctatattcccctcatttttactctccgccttgaaagccacttgcgaagtcactccttccactaattgccctccttcgggaaaaaagcgcacactcaacttctccttagtttccgacggacggttctccatcgacggactaagttcgtaagttgtgatactacgttccagcttatcactattcgcaagttgataaatcgggaaagtacgtgagaaatactgcggttcgttgaaagcaagcatccagcgggtataggcacgtacctcataatagccggataacatggaacggggaagaatgaattgtccgttcccttctccctgcgtcagtttgatgatttgtttatctgctatatgtcctgtctgatccaccagttccacatacagggggcggctgatcggactgaaagtctgcttttcggcgagagtgacataagccttgaaccagatcgtatctccaacataataactcgtgttgtcgaaatgcaaataggctttctctcgcggatagttgttggcgaatgtttgtgcctggttcatgtattgtgtaaatacagttttagcaggaggtatttctccccatgctattgctaatggtaagcaaaaagaaagaagaaaagtaattcttttcttggaaatgcacaaattgtttgcaggcatatttgtaacaggttggaaataagttgcaattacagagaataacctttcaagaacacaaattaagaacagaatttaagaaccagttttaagaacaaagttatgggaaggcaaattttcattaaccaaatgcaatgcaatttcaatttaagacaacccaaagcaaataaaccaaccaatatatatttggttgtatatctcaataacaaacaagtaaagctctcaacgggagttaaagtatatccagaacactggaatataagaaaacaacaagcgtatgtcaacgcacgtttgtcaaaattagataacaataataatactatagctaatgatagattatcagagctaaaagatatgttcttagaatttaagcattatctttgtgaacaccctactgatattgaaaatagtataaccatattaagaacacgcatatataaaaatacaatgactacagaaattaagaagaagtcagcaacgactgtaatgaaagaaattatagatgctaaacaggcagcatctagtactaaagaacaacaaaaattaaatgttggcaaatttgagaggtatctaaaagaaaataatatctctgacacttgggaatccatgaatttaaacacctttgagagctatcaaaaatatttagttgataatggaagaggtagtgtaacaataaggaatatcattcagaatactctatttccgttattgaagaaagttagtaaaagagtggatattcccttcacgtggtatgatagcaacttgaacagctttgaatttgtaaaagatgaatctaataaagagctagccagtaataaaaaagtcacattaacagaagaacaactaaaacaattatatgattacccaataacaggaacagaattacaagtaagaaaacgtactgaaataagagatttattcgtactgcaatgtttagttggtcagcgtgttggagatatgcagaaattcttcaatggcgataacgaaaaagatgaagaggaagatacaatatctataatacagcaaaagacaaaagcaagagctataataccattaaccccattggcaaaagaaatcatatctaaatatcaaaacaccgaactgaaatattataaaccaagcaactccaatctaaatgcagagttaagaataattgcagaagaagcaggtttaaatattccaatcacttttgaagataaggatggcaaacaagtaaaacctttatttgaattagtccatacccatacggctagacatacattcattactataatgtgtagaagggatattcctaaagaaaccataataatagcaacaggacatgaagatacaaagatgattgataaagtatattcccatttaagcaataaggataaagcccaaaaggtatctaccgcttttaagaaaaaattagatggtgatatttttagtatgggcaaggtggagacaaattctcttaatgaagcgaagcctacgaacgatgcaactaataatatcaccttcgatactttgctagacactcaattttttgcgtctaaaatcaataaagctgttgaactacaatcacaggtaggtcacttgaaggatgggaaactgtgtagctatgacaatgaaatcacgtctcttataagcgagatagaaaaattctcccaatcttccacttctgattctgatgtggcaaaacaatatgtgaaacagttatctgtctggaagctgtcagacttacatgactgttttagagaaatgattatcaagtgtgttaagattggtatcagtaaggatgcaattatgcagtttatcaataaagcactggaaataggcttgttggataaggaaagattcaccaatataaaagaaatcactacagccttattggataaaaggaatcagggctgacaagcttttttggaaatcaaggcttctggtaagcctgaacatcatattctccccgaacagctacggttaaggggagaatttttgctttattgcatcctcaactcaaatattccacaatttcgacttgtcgtttggtgatgcggtcgggactttatacctttgcaatgtgattgaaagtcagaaatgaccgagtttctcgtcacccagattcaccactacaaacctaaatctacttcaaatgaaagaactgacctacgcagacattcgtaaagtggcactagagcacggtatcaaggacacaaggctgcacattggactttgggctactgaccgatacatcaaaaagcgcaaaatggttcatggcaagacctacacaatctacctgccatatcataagccggagcagaaacagttttaagtcctagacctactttcaactattaaacagagtacaccattgtcaactaatcatctaattagtagcactatctactaatgtgcttactaatacagcaaagttatgtgctgaagtattgatattaccagattataaaggtgtgcttattcccccctttagcggtgtgcttaatccccttttggagcgtgcttattcaccccctgtctacactcctagatactacactccatacagccatactgtaaagttctgacgaactttcagtaggtgggataagtaggatatataaatcaataatatatgtggcattataataataatttatatgagaaactaagcgaactaaggaaagtgaacagactaagttccactaaaatgagattcttgttaaagaccaatcagattattttgattaaccatattgagcgtttgccttatgaaagacacgaaacttccattcaaggagtacacagtaatgagtaataatctgattcagaatctaaactgttcagatgtgtacagggcttataccttgctattaacagcagataaagattctttggaaaccaatactacattaaaacagcttgcagggtttgtaggggaagaactggataattacaagaagagtaagagtacattatccttcaatgacaaattaagggctacaggcgaggttgttatacgtgatatagattccaaacagaaggacagacattggactatgtacagattcaaccaagtagagccaggcaattatagaagaattggcagagagttctacgatacttacaatactttagatttgaagctaagaggattcatattaaagctattcagtgtaacagagccgcatagttatgttatcaaattatcatccataaggaaattggagaagcgtattcacatgggacatgatgctattggtaggtacatagagcagttaaaggatttggatttattggatgaaattggtgactgtctgattctaaaggtcaaaggcttaataatagaccagcctaaagataaacaggtaaagaaactaattgccatgttcgaccacatgatagagttcaacgaaggcaataacaaaccattatccagagaatgtatgatttataagaagtataaggagaatggatttaaagatgtcaagaatatccacgcttttatgaagtcaatacaagcaggtacagtaggaagaaagcgacctgttaaggaagatataccttatgagattattctgtagttagtttgtaagcaataaagctccaaaccattaatcaggtttggggctttttatgtatatccccaactcaaaaatataagtactctaaattcatacccccgacccttttcttgaggaagtgtttctatttagactttatgcagctataaggtgaaatatttgattcgtcagtgagcgtatcagatgtatatcgtgcacaagccccttctgttacccaaaatacccctcaccaatcattaggaaaaatgaaaggataacatgaattgctattcagcccacaaaccttttgaacttctgaaatgtgcggacttatcaatgatttgtatatgtctacatataaagatgcacaaagataagtgataagaaagaacttcatgttaagccctcattttgtccttaaatacactatttactaatctattattatgcgtatggagaatttaaagattttattgacgtttggaataattctaattgtgccagtagtcttaatgccacagttctttattggattattaatactgattgtggcttgcttagctttcagacagaggaatttctaatattaactaaataaattacagattatggaatcaacattacagattatgccagtacagagaattagtagaaactttggtgaatatgcagaagaagcggtaataattgaagagccaattattaagcagaaacgacctctattcattgaagctaatacgattgaagccagtttggagcatctaaggaatgattgtattatacccgtattcgcaaaggacaacgaagctacattatctcatgtggctttcattgaagcggtacaggatgcaaccaatacattctttagcggtgaacagattgaatcgccagatattcgtgtttctcatgtaatcaaaggtaggattcccgaagcgatacataagcccgccaatcagttactagaaagtgacaagactatctactacgagaggtgcgcttttgttattgaagttcctactatctatgagacagtgaacggaaacaggctaacccttactattggtggtgtaagagcttataaccataccaatctttattcaaagaaaggtgcggaacgctttaaagtgtttattggctttacttgtaaggtttgcacaaatctatgtgtatctacggacggttatcttagttgcttggaagttaccaatacaagggatttatatcaagcggtattggaaatgttccacaaatacgatgcagccaaacacatacatttgatgcagtctttaggcaataccagtatgacagagcatcagttctgccaactacttggaagaatgagactttatcagtcattaccgcaaggctatcagaaagatatacctaaaatgttgcttactgatacacaggttaacaatgtggctaaagcgtatatcaatgacgagaactttggcagcttgggaaatgatttgtctatgtggaagttctacaacttgctcacaggtgcaaataagagtagctatatagattcatttttggatagagcctataatgctacagaacttgcaacgggtatatgttccgctttacatggtgatgacaagtatcaatggtttcttagttagtggtattacagagtacttaaaaggggcatccatataataagggtgtcccttgattattcattacctattaatactcaaaagattatgttacaagcattattaatcgttatatcttggattatcttgttacttgttatgtgtgcaatttcacctattgtattcttcttgatgattatttggactatatacaagattattacggtgaagtagtacatgaagaactaataagggtatctatatactatatataggtactctttattagctatagccagcagtataacattcacttctactattagtgaatgtttagctagtaatcagtaagttagatattccaactcaaaattaatattcacttatattagtttcactataaaacagaacattatgtcacttaaatattcaagtacaacagcagattatctgcaatggagcgaagcgatgaacctaataagaaaattggcaagggacagtaattataagatgtcacttcttattgctttaggttgcttcacaggtttaagaatttctgatattctcgctttgaggtggaatcagatattagatacggaagaatttaccattacagagattaaaacagggaagcaaaggacaattaggattaatatgcagctacagcaacatatcagagattgttatgggcatataaatccagttggcataaatgcacctgtattaatgagtcagaaggggacagtgtacacagttcagagaatcaatgtcatgctgaaagagattaagaagaagtacaagttgcatataggcaatttcagttgccattctcttagaaagacctttggcagacaggtctacaacatgaataacgataattcagagcttgcacttgttaagctcatggagctattcaatcactccagtgtatcaattactaaaagatatttgggattgagacaggaagaactattaaatacttatgattgtcttagcttctgataattgagatttgagacagaatgaatcggactttacttatttatgctctgaatagttctgtctcaatttatggatattcagagtagaaatagctttcaactctcattttaacagatacatttaattgcaaaataaaatacctttcattatctttgtaccaattccaagaacttagagagttaagttgttggaaggacatattaacgaaaggtgttattgaaattatcttcttgtaacaaatctcgcaaatttgaaacgctgtgaagatgatagcaatagcacccgcactttggatatatacttaccttacgtttgtaaagtttctatatgccgcttggtgtgggttgctattgttttatccacagcaaaggcaatgcgagagcccgttacaaggataaagcaaatagtgttcccacacctttctatatgtaatagccaactatagggaacaggttggcataaatacaggtatataagaaacagacagtctattttactactcaacagttctttattaaagaagtgtgcaactctatgttgtgttcctcacactataattaataactaaaagcctgttaaggaacaaaagggcatctattaatgatatgaagaaagtaattctattgtatgtgatgattctaatttcaagtatcatatatgcagatgagattagaaatgtaaatggagaagctagaggttttagtaataccagtgtaattattaagattaaagtacaagataatggtaaaattaccgccatagctctgtatgatgattatgctatactcaataaagacaaatggatgagtatatatgtacctatgcgtaagattgaagacgacatagctaatcccaatattcctaaggaaacaaagaattatctgttaaaggactatcctaagaagaaatattacggcaatactaaaatcaataataagcctgtgacaattatattctaattataaatatcgcagttatttattgacaattattatttaatatcccaaaggggttaactatatattaatcagctaaggaggaatttacaatgaagagaccaaatgtaaacatattgtacatctgtgtaatatttgcactaattacattattcagttgtaaaggaaagggtggtacttatagggacggtgtattctatccaaatgatgagaaactggcaggtagtaagaaagttacgaaaccggatggacatgaatatataatgttttacaatagagatgggacaccacaaagcggagaaggaatgcatcatcctacctgtaagaagtgtaaacaactagagaaagaagggtactatgaacatcaatttatactaaaagacggaaagaatattcatgaccctaattgctctgtatgtaaagaatggaacaactaatacagaaactactctaaggtaatgaagaacgaatttatagcgttaataatattgttcttattagtttcctgccaatctaggcaacaagttacagagaatatctccacaatagatagtatattacaagtaaatgtaacttctctactggagaataaactatctgaactcgatgctttatctgggcaggctatagtaatggaagttcaatcagggcaaataaaagctctggttggacttactaggaaagacagtacgaactaccaatcatgtgagaacttctctgtatggcagtctactggtctgatgcacccaatatcgctattggtagctttagaaactggtaaggtgaagttgagtgataaggttgatactggaaatggtatctaccaagttcaaggcagagagcttaaagaccataattggcatagaggtggatatggtgagcttacagtacaagaaggattggcagttggttccaatattgctacttataagacaatggagaaggcttttggtgataatcctcaaacctttttcgatttattagctaatatgagctatggtaaaccggatagtatcaatggaattgccagtctgcaaccttacaagattacagaaaaaaatatcacttggaactgtataggatatgaacagcttatttcacctattcaagtccttaccttctataatgcaatcgctaataatgggaagatgatacagcctcaactatataaggatagtgtagtagttattaatccccaaatagcaagtagggctagtattgatagtttgaagaaagctctagtatttaatattactgacggattaggtcaacatgctaagtctgataaggtactagttgcaggtatgcagggaactagttcattatctactaatgaggatagtactaagggtatgtatgcagtagagttctgtggttacttccctactgataatcccaagtatagtattattgtatctattaataagactggattacctgcaagtggtgaactaatggcaggtgatgctttcaggcaatttgttgataaaataatggaaaaataatcatggatggtataattgaatttgatttaatcaagaatcaggcttccaacattataaaagtaataggtgtaggtggtggcggtggaaatgctgtaaagaatatgtacagtcaaggcattaaagatgtttcttttgctatatgcaatacggatagtcaagccctaagccgttccaatgtacctactaaaatacagttaggagacactggtctaggagcaggtggtaatcctgaaaaaggacgtgcagcagcagaaacaagcattgagcagataaaagctctttttaatgatactactcaaatggtatttattacagcgggaatgggtggtggaacgggtactggagcagcacccataatagctcatattgcaaaagaaatgggaatattaacgataggaatagttacaatcccgtttcaatttgaaatgaagcctaaaatagtaaaagctattaagggggttaatgagatgaaagaaaacgtggatgcgttgttggttatcaacaatgaacgtttgagagaaatatacgctgatggaatcactacagctaaagaagcgttctgtaaagctgatgatattctaacaactgcaaccaaaagtattgcagaaataatcaccattgaaggaactataaacagggacttctgcgatgttgaaaccataatgaaagatggtggaagtgcaattatggcaatgggtagagccaagggaaaatatagaatacaaaatgcaatattggatgctctcaattctcctttattgaatgataatgatatagaaaaagcacaaaagctattatatattatctattccagtaaagagaatcctattcttatcaatgaattgtctgaattgaatacattcatggaggaattagacccaaacattgaagttatttggggactatatgacgatgatagtttaggagaggatgtgaagattacactaattgcaacaggttttgataacaagaaagattctgtgaacgctgaaattagcgatgatgtaagacttaaatctgaaattgagaaatattacaaacctactcctgaaccattgagtaaacaagtccaatcagctattgttgaatcaaataatgatacaaaagaagagataacagagacgcaagagcctattacatttgaagagacgacatctcattctacaaaagaaaaacttattactcgtcttagtaatataataagtaaattgatggaagatgaatagcatagtagtgttttcaagaaactgtttatcgcataatttctaaacaaatagaatatggaaggttggatagttttaggcttaatactaatagttatcgcctattttttggcaggattggattatgaaggaggtctgtaaatgatgaaagggaataaactttttttagttgtgacagatttatgtagcaatgccttaccgcttactttgcctacaatcatcttcaatttcaataatactggagttgtaagagggtgtatcatattactgccatctaaatttgaaggacgaaaacaaatagaattagctaatgagcgcatgagtgttctgtctccattatttgactttcttattgtggttaatcctcaaaaactttcccgtgaatttgtaaagatacataatattaacgggtttgaagctttttatgatgaattatggaaagaagttgcaactcttacagctatcgttcattcttccaagagtttggatgaagttaggagaaattgggagaaagataaatcatcaaaagcactattgcagggtggagctttatatatcattagagataaggatattgatttcactattgataaaaaaactttgcttttaggtgtaggtgatgctggtactggagtggcagaagaagttcatttattaggtttaaacaatatgacggtggttcgattgggaattggcggtgtgagatgttggggaaatagctatagattagatttagcgggagattggaattattgtaatgggattgataaaaggtatcattcttgtatcgaatttgtgaagaaaaacataaacgtaatcaaatatgatatagagtactttttaggattcgatgtttcttgccaatcagatatacaaattaaagaacttgaaaaatatagtaaacacggtcattaatgaacacagtagtatgataaaattcagccaaataccatattctacatattcctatgatggaatgcccaaaccaacatgggtaaaagctacttgtcccccaaacggtattcctcataatttcagcttatctgatgatgatatgctgacctattatcttgaaatatttagaaatagaacagctaaggataagccatatatagaccaatataactctatagaagaattggaagaagatatatatggtaactgtttatactattggattcctaaagattttaaggaaatatattgtgctcttgataaacaaaatttttttcataaaataaatgtattgataaagcaatatggtaatgccattgtaataaaacatcgtgctttatgtataaaaacagatgaaagtataaatctatattctttttataaaggtttatgcccagataaagatatattgtctatatgtattccaatacgaatatttgaattaggactgtgggaggaagggagcttaatgtatatgactaacgaagattattataatttatcaaaagaaattctagtcaaacatgaagcaggagaattaacggaaaaccaaatagaagaaataataggttctgtaatcataaaagaatggataattgacataaaaccaacccaatagaatacttaaaaagagattatatcatagaaggacttaccaattgttgtgtggaatacgatgagaatggtgaggagatatttataattgaaaaaactaaatgaacaaatatgataacagcagaacattggatggaagggattaattctgtactagatgagtacggactatcaagagaggagttttggaaagaccctaaggcgttccttgacaatttagatgatatggacgcaaagcttacactggagtattttatggaagtagtataaattggacaataaggattcttaatattatcatcaaaatgtgattcatttgcaataatccccattttaaacaagaacttatgaaaacaagaaataaactattaaagtatttagatacaagttgggaaatgttagcgaataatgaaaagccacctattattgatttatctgaatttaatatgttttcattttatattcaaatatttaccaacaggaatgaaagaaaagcaccatttattgggaagtactattcatcagaagaactggaagaagatatatatggtaactgtttattcatgcaccaaggatggaaatcaatggattttaagaaagtttattccatgttggacaaaggattatttattgaaaaaatgaacaatatgattaaagattatggtaatctcattattgatttaaataatcccaatgatttaagctataacatatatagtaccacaagaattgattgggataataaatctgatagtttttaagtaagtgatagtaaaggtttgattagtttcccctttattctatttgccataattggacatttgggaaatgtttaagaggttctataatctaggatatgacaagaaacgcagggtgtaactaagaaagataagtcaaaggttaaggtggtaagtgaaatttcatttactgccttattttttataatacagtggactggaatattggataaatttgtttctttgcagtcattgattttaaaagataataccatgaatgaatatgtagatttttatatgcagagatgcttgcaggtagccacaagcatagatgacaaaagcaaacatattatattgaacaatatcaaggctataaattatgaggaagctgtaaaactcgctaaaaccataatcatagatgataacaaacgaaaattattgctaagtgaagaagtctttgttaacgatagtactttagctcaatatttagaaagagaggaactggatgcgttaaaattatggagattatccgtattgctgtacgctatgataatgggatgtaatgttgctgaactatccatatctgtagcagaccaatatttagacttgttcaaccacctaaacgatggaatgaaggttgcaagtattgaagtagtgggtaggttgccaacagaaacgaaaaaaggtaaatcgtcaactaaaaccaaaaagtttactatctctagtcaactactgattaataaaatgaaacaagcttatttagaactgcaagatgatattgtaacagtagataacttgaagcattatacaattgaaaggattaccactatgaatgaaatagcaaacaaaagaatcttgaattattattttgcacaagaattgaaagccttcttgagcaaatacaaaggtggaaaaatgtcctcaaacagaaagaagcttgttttatacatcctatacttgtttggtcgtttcaagaacaatgttccaataaatacagataattatagagcattaatgcgcgactataataaatccccaataaaactttctctattcacagtaaacgggcagtcgttccccttaatcttactgcctaatccagaaattgaaaaaataaggtctaaatatagaaggttcatagaggaaatgtgaaatttcgagataatctgatttttcacgaaaagtaatttatggtttcttaccttcgcagcgttggtaatattgccaattatcttaaatttttatagataatgaataaaaacattgtaacattaaaagacctctttattggaggtaaaatgattgcttttattaagggtaatcgtagtgttaattcaaagaacatttcaagaaagaaaaagtcctttgagaaatttggaatgaatcttgttcctttaatgtatgtagacggacaaaaagcggtaaatgacggctgtactttggtgcatcctattacgaaagaggatataccggatgaagaagcaagtaagtatgttgccattgttgagggacaacatagatatacgacagccgaagaaacaggtttagatgaagaaaagctgttcttgtatgaatgttacagcaatgagaacactaaagagattctctctgaaacaaacacaattactgacccgtggagtggtgcagattatgctaatggcgcggcactatttaatccccaaaatgagttggcaaaatttacaaaagaacttgccgatttaggttatccaaccactacgataggttatattgcttgttttgctcctggtaagttgggaaagacagcatactgtaatttgattgcaggtaaagaaataaaaacagattataatctggaacgtgctaaatactttttggatgcagcacgaactaaatttgacaattcctttatcgctaaaagatacttgattactgtagttgccgacctgtctacagaacatgggtataaacttgtttgtgacgctttaaaacaaatgccagatgctatagtaaaaagagtcctagaagctaaaagtgaagagaaacaaagtatattgaaaatgaccttagaaagtctactcaataaataattagaatatagccagttgtcagtgatgatagctggcttttttatctaaatatgaattgtcacatctaaatgcagactaaaattctaatctcaaaattatgccttatacataattaatcctatctttgtgtcgttcaaacaaggctatttaagaacaacgtttaagaaccaaagttataaatcattgaagcacaaggcttttgagcaaaagtaattcgtttgtttttcatcttagtaggttttttaactagcgtacaaagttagaacatattggcctgaaaatagaaaacttattgttcaataaaggaaaaaaactattcatagtaaaaataaaagttcacaaaagcgttgtatacctgtttggtatcatatatacctgattttgttctttattgattagcatttttccttccttttccataaacttctctatttttgttttccagataattgataatactatggtaaagaagaatttcttaatgactgcccccttactgatggcatcgttttgttcggcacaagagaagccgaatgtcgtactgattatggtagatgatatgggttattccgatattggctgctacggtggagaaatactgacccctaatattgatgcgttggcatccaaaggagtacgtttcacacaattctacaacacttcacgttcttgccctgcccgggccagtttaatgacagggctatatcaacatcaggcaggtatcggtcaagatgtccgaagacccgtttaaaaatcccggccagaagagtccgaatgattggggagtgccgggatacaaaggattcctcaaccgcaattgtgtcacaatagccgaagttctgaaagaaggcggctaccatacctatatggcaggtaaatggcatctgggaatgcatggagaagaaaagtggcccttacaacggggatttgaacgcttctacggaattttggcaggagcttgcagctatctccgtccatcgggaggacgcggcttgacccttgacaatacaaaacttccggagccggaagcaccttattatacaacagatgcatttaccgattacgcgattcgctttgttgatgagcagaaagatgataaacctttcttcctatatctggcatttaacgctcctcactggccgttgcaggcaaaagaagaagacattcaaaaattcacgaagatctatcgtgagaaaggatgggatgaaattcgtgaagcaagacggaagcggatggctaagttgggaattatcgactcgaatacagagtttgccgaatgggaaaatcggaaatgggacgagctgacagagaaggaaaaagatgaagtagcctaccggatggccgtttatgcagcgcaggtgcattgtgtagattataatgtaggaaaactgctggactacctgaagaagaatcataaactggataacacgcttgtcatgttcttgtccgacaacggtgcttgtgccgagccatacgctgaattgggaggcgggaaagtgtctgaaatcaacaatccggcttgtagcgtgttcccttcttacggaagagcatgggcacaggtttccaatactccgttccgtaaatacaaatgccgttcttatgaaggaggtatttctacccctctcatcgtgtcgtggaaaagcaatctgaagaataagaaaggtgaatggtgccgtgttcccggttatctgccggacattatgccgaccatcctggaagcaacaggagccgcctatccggaaacttatcacggcggaaacaaaatatatccattggtaggcagtagtcttttccctgctattcaaaagaaagcagactctatacacgaatatatgtattgggaacatcagaacaatagagcgatccgctggggaaactggaaagcaatccgcgacgaaaaaggaaaagaatgggaattgtacgatgtggttaaagaccgtaccgaacgtaacaatctggcagaacagcaccctgaagtgcttaccaagttagttgccgaatgggagaaatgggcgaatgcaaactttgtattacctaagcatccaaagaaataaataaaggaggaacacaaaatgaataaattactagtaagtgcatccgtagccttgggagctactagcctgtcttttgcccagcaaacggaaaaaccgaactttctgttgttcatagctgacgactgttctcattatgatctgggctgttatggcagtgttgattcgaagactccgaatatcgaccactttgccacacagggagtacgtttcacacaagcctatcaggctgttccgatgtcatcgcctacccgccataatctatatacaggtgtatggcctgtacgcagcggagcttaccctaatcacacttgtgccaatgaaggaacattgagcgttgtacatcatctgcaaccgttgggttataaagtcgcgttgatcgggaaatcgcatattgccccgaaatcagcatttcctttcgacctttatgtacctcctttgaaaggtggggacttgaattttgaagcaattcagaaatttatttccgattgcaaggcgaaaggcgaacctttctgtctgtttgtagcctccaatcaaccgcatactccttggaataaaggcgatgcctctcaatttaatgcggacaaactgacactgcctcctatgtatgtagatattccccagactcgcgagttgtttacccattatctggcagagatcaattatatggatcaggaattcggcaatgtcctttctattttagataaggaaaaaatgacggataaatctgttgtcgtatatttgagcgaacaaggcaacagcctgccttttgccaaatggacttgttatgatgcgggggtacactctgcctgtatcgttcgttggccgggagtggttaagccgggaagcgtaagtgacgcgttggtagaatacgtagatattgtccctacttttgtcgatataataggaggaaagccgcaggcgaaagtggatggcgaaagtttcaaaccggtattgacaggcaagaagaaagcacacaagaaatattctttctcccttcagaccacgagaggcatcaatgccggatcgccttattatggcatccgttcggtatacgacggccgatacagatatattgtcaatctcaccccggaagctactttccagaatgttgaaacaaaatctcctttgtttaaagagtggaaaagactggcggaaacggatagtcatgcaaaagcgatgacgactaaatatcagcatcgtccggctatcgaattgtatgatgtgaagaacgacccgtattgtatgaagaatctggcggaggacgcgaaacaagcttctaccatcagccgcttggataaagagttgaaacgctggatgaaggattgtggagacgaaggacaacctaccgagatgcgtgccttcgaacacatgccgggaaagagaaaataagccgtcacacagtcaaaacgaataaaacacagaatgtaatttataaatcgtatatcatgaaaaaagaattttttggtttgctttgtggatgtactctgcttccggcatttcttcatgcgcagacagagcgtcctaatattgtgattgtattggccgacgatttgggttggggtgatgtaggatttcatggtagtgaaatcaagactccctgtttggatgctctggtaggcgaaggagtggaactcgaacgcttttacacttctcccatcagtacgcctacccgtgcgggactgatgacgggacgttacccgaatcggtttggtgtccgttcggctgttattccgccctggcgtgaggacggactagatgagaatgaagaaacgatggccgatatgctggcacgtaacggatataagaacagagctattattggtaaatggcatttggggcataccaagaaagtgcattatccgatgaataggggcttttcgcatttctatggtcatctgaacggtgcgatagattatttcgacctgacgcgtgaaggtgaactggactggcacaacgactgggaaacctgccacgacaaaggatattctaccgaattgataaccaaagaagccatccgctgtatcgatgcatacgagaaagaaggtccgtttatgttgtatgtggcctataatgcacctcatacacctttgcaggcacaggaaaaagatataaaactctatactaacaatttcgacagcctgacaccgaaagaacagaaaaaagcgacttacagtgcaatggtttcttgtatggacaggggaatcggtgctattgtagatgccttgaagaagaaaggaattatggacaacactttctttatcttctttagtgataacggcactgccggtgttccgggatcttcatcaggacctttgcgtggacataaattcgacgagtgggatggaggcgtacatgcacctgctgttctttattggaagaaggcagagaaacaatataagaacttgagttcacaggtgacaggttttgttgatcttgttcccacattgaaagatttggtaggagatcacagccgtccgaaacgtgaatatgacggcatcagcatcctccctgtattaaacggtaaaaagacctgtatcgaccgcgatttttatctgggacacggagcagtagtcaataaagactataaactgattagaaaaggtatgaaaccgggactggatttgaaacaggactttctggttgattataaaacagatccttacgaaaagaaaaatgccagcgcaggaaacgagaaaattgtgaaagctttgtatgaggttgccctgaaatatgacacgatcactccttgtataccggaagtaccttacggtaaaggtcgtgacggattcaaagctcctaaagaatggaaagtagtacgttgaatctgttaaccctatgaattgaaaataatacaagatggaaaaatcaatgattagtttatgcctcctaggcggattggcgataggaaacgggtttgcccaaactccttcgaagcctaatatattattaatcatagccgatgactgctcctattacgatataggctgtttcggagcagtcaacaacaagactccccatatagatgcattggctcgacaggggataaagttcaacagtgcgtataattctgtttcgatgagtacgcctacccggcattgtgtttatacaggtatgtatccgatgcatcatggcggttacgccaaccatagctcggtcaatgccgatgtaaaatctcttcccacttatctgggaaatctgggttatcgggttggattggccgggaagtggcatatcaaacctttggctaacttcccgttcgaagatgtaccgggattccccaaaggatgtacaagcccaaacactgattatcataccaaaggtatcgagaagtttatggaacgtgatgcttcccaacctttctgtcttgtcttggcttctattaattcgcatgctccctggacaggtggtgacgcttccgtcttcgaccggaagaaacttcagttgccgccacagtttatcgacacggaagtgacgcgtgaatactatgccagatatttggcggaagtcggcctgctcgatcaacaggtgggggatgctatgcagattctgaaagaaaagaatctgttgcagaacactcttgtcattttcatatccgagcagggtacgcaatttgccggagccaaatggaccaattggagcgccggtgtcaagtcggcgatggtggcttcctggccgggtgtcattaaacccggtacggagacttccgctattgtgcaatatgaagaccttcttcctacatttatcgatgttgcaggcggaaaggtgcctgacgtaatagatggaaagagtctggtagatgtatttcaagggaaaacaaagacacaccataagtatgcttatcatgttcacaacaatgttccggaaggtccggcatatccaatccgttctatttcagacggacgctatcgtctaatctggaacttgactccggaggaaacatacgtagaaaagcatattgaaaaggcagaatggtatctctcgtggaaagcacaggacacggatcaggcacataaaatcatgaaccgctataagaatcgtcccgagttcgaattatatgatatcaagaaagatccgtttgaaatgaataatttggcggatgtgaagaaatatagtaagaagaaggcagaactgacgatggaactgcaaaaatggatgaaacagcaaaatgataccggagctgataaagactggccgcgtgctcctaagaataggcagaagaaagcagccaatgtataatattcgtaatgctaccgcttgttgctctctgaaagagatttgggttcttcgtcaaatttggtggtacttcttctattgtgaataaataatcttcgctctcagtagtttaattcctgccctattgtacatctgtctttttaccgctttaattttattcactgtcccctccagtaatccgttactgaaggggatatcaatagctgcctgtactgcctcccagtctttttcaataccatatgcaaagttcgtcagtgccatattccgtgttgccttcgctttttcaatccactttctaatatccttatcataagtgttcccattaatcatatctctgaaattctgacacacgcttaaaagttctttaatctgcggtgaggacttatacagttccgctagtttaggattatccgattctccctttagaatgtatttgcgtatctgattctgtgaaactctctgtattttacttctgttttcaatgctctcattatgctccttgacttccttcctcttttgttgatacctttttcgcaagctggatgttatccttccaataagtgcgccactgattttactccccattttttgtgccaatatttttcgagtaatacagcccgcactaatgattgtagccagttcggatacatgtttaagagctgtcttctgttgctcattcaagtatgcccctattcttctgttgtgaataatcttataaatgtagcgacttttcttacccaaatgtgtggctgtctgctcaatggtcatcccctgcatttttaagttcaagctttccctgtatatcttcaatttttctctgtgtcggacatctcccatgttaaatatgtcctgaagaattaacgaagaagccgtgtctctgtcaggatattcgtatttgagctttttcttggtctgacggattattttctctatttccggtatcatcgtgtccgtcatattcttgattagatggaatcggtcgcagatttgtgtaacaccaggaattattctgtttatagcctctgtgaaacatcttccacggtctctcgttatatattgtatttgaggattccggatgagccagttatcaagtgcttctccgtttctatcctctaacaaagcaataggtatgtgtgtcatctggtctacggccacactcatataatccttaccttttttataggcaaaatcatcaatacctacataaatacttttattatgcataggattgtgttgtccgcactgttgtaggatgcgtaagcaggaagaactactggctgttatatggaacagttgcaaaagagaagaggcctttcgggaagtaagttccaaacttatcgatctgatgcgttcctcaacaagatagctccgtctaccataccgacgagccagaaaagacaacggttcgcagaatattttttgtggacaagaaacattgtcacaataatatttgccaaccttgatgactaactccaaagtatgaccgtaaacttcaagatcctcaatatgacgggagtagtaactgtgcaatcggtgactgaaatgtccgcaataaggacaggaagcccctttgccagccgtatgtagaaagaccgtcaatgagccaacagcttcagagataccatcttgttgcagattatcgtagccaagactgaatctgaaatcatggaataatcccctatttgtaggagcattttctttttttgatgtatatttgtacgttgtagatatgacttgttgcattgtaactcttaatgatgtggtgtctttaaagttactaaaaagcaaacatatctacaacttttaataggattaagaaagaagaagacagttgaaataaaaaagagattaccaccaaatttgacgaagaaccgagatttgtcttttttatttctcatttctcataaaatctagataatgagtttataatcagtaatatatagtatgagaaatgctttctatgcaggcatttctcattctttttacagatattttaactaaaaaacggctatttctcattcgtttttcaatgatttctcatacatctgccctgtattcgtcctgcatttctcatacatttctcatgatgattgcatagacgatggttgctgatcttatttacattgaaaacagatgaaaggtacttatcattcaaacaaccctatgccggcatgtttttcattcgttatcgtccagttattgatagagcatctccatcgttccactagagtgacgagggttgttcactagagtgcatagattcgttcactggagtgaaaagacttgtctactggagtggaacgattgagatgtcagtcagataatccgggcatgtcggttggaaaacatgaagagataggttatatcatacataaactatagctttaatacattcaatatatgaataaactaatcacaatctcctctgcacttctcacagttgctgctgtaaaagcgcaaacgcccaatattgtatttatattggcggatgatttgggttatggagacatctcggcctttaatcccgaatctaaaatccatactcctaacattgacaaactggccgagcacgggattgcctttacggatgcccatgcttcttccgctttatccactccttccagatattctcttctaaccggaagatatccgtggcgaaccaagctgaaacgaggtggtcttgatggcgattcgcctgcaatgattgatcctgaacgtcgcacaatcgcgcaaatgttttcagcgaatggctataataccgcttgtatcggtaaatggcacttaggctgggactggggatatacgaacaatggcagaagcatgaaagatatagatttctcgcttccgatcaagaacggacccaccgacaggggatttgattactatttcggcataccggcgtcattggatatttctccctatgtttatgtggaaaataacaaagcaacctctatccccgatcatgtgatagaaccccagaaaaagaatctggcattactgatgcacggaggaatggcaggagccgatttcaagccggaagaatgttttcccaacatcattcgtcatagcctgaactatatcaatgagcagaaagacagcaagaaaccattctttttatatttgcctattactgctcctcacacccctatattgccttcgaaagagtttcagggcaaaaccagtatcggtccttatggcgatttcgtagtcatgatagacgacatggtgcgccaaatcgtaaaaacattgaagaagaacaagcaactggataataccatcattgtctttgcttcggataatgggtgtgccagttatatcggcgtgaaagatatggaaaagaaaggacattttcctagttacatctacagaggctacaaaagcgatatttacgaaggcggacacagaattccccttattgtctcctggaaaggaaaatatgggaaagagacaaacaactctttagtttcattgatagacttttatgccacttttgctcaaatgcttaaccacaatttggagacagaagaagctgttgacagttacagtatgtggccgatattgagtaagaaaggtgcttctgcgcgtaaggacttggtgcacgaagcgggagaggggtatttgtctttgcgtacttcccaactgaaattggtattctacggaggttcgggtggctcttcctatcctctcaaaccttctgatgtggcgaagttccctccgatgcaattgtttgatatcgtgaaagatccttcggaaaaagaaaacattatcggtgataagcgttacgaaaatgaggtgaaagaaatgaaacgggctatgaagcaatatgtagagaatggccgttctactcctggtgaaaaagtatcgaatgatacgaagaatagttggaatcaggtaaagatcttcatgcaggaagaataagcatttctgaaaaagaatatgaatataaaaaaacagcaccctgaatagacgtcagaggtgctgttttagtttcaacaaggaaaagagtattattctatttattatttattatttattcagagagttacagatctgttggttgatttctctgactttagcttcattcatcttgataactttacggtcataagtcatcagaccgttgatctcaccttctacgtctgttgtctgggtatatacggcagcagagaatcctttctggatcaattccaacagatgtttgccatatttaatgtattcgttcgttacttcgtctgatgtattgaacttcacataaccccagtttttcttgtcattcacccaagtatttccttctactaccaagccgatacctccatattcacccaatacggtagcacgtctcggatcgtaaaggaacatgttcggacccggatagtggtgaaggtcgagaatatcgccacaagtatagtgattaccaccgctggcaggattcaccaggcggctaggatcgtattctttagtccatgctacgatttccggagtcttgaattgtccccatgcttcattgaaaggaacccatacagcgatactcggataagaatacaaacagtcgatgatttctttccactctttgcggtagttagcttccgaagcagcggaacgaatcacttctctgccgttaaagtagttgcgtgcctgccactgtgggctaggaccaccgttcggcatatcttgccatacgatcaatcctaattggtcgcaatgagtgtaccagcgtgcaggttctactttgacgtgcttacgtaccatgttgtagccgaagtctttcgtcttcttcaagtcataaaccaatgcttcatctgtcggtgcagtatataaaccgtcaggccaccatccctggtcgagcggaccgaactggaaatagtctttgttgttcaattgcaggcgagtgatgccattctgacccttgcggatagaatatttgcgcatagccgtataactctttacctggtctattgcttttccgtctttatacagagtcacttccatattgtagaggaaaggagagtccggagaccacagtttagcattagcaggcattgccagttcaacaggtactccgttcaacgctgcgcctttggctacaaggtttttgccatcgaatacttttacttccactttgtctgcggaggtcgtattggcagcaacttctaccttaacagaattgttgtcaatatcgggagtagttttcagattagtgatgtattgtgttgctaccggttccaaccacactgtttgccagatacctgtaaccggagtgtaccaaatgccatgagggtttgctatttgctttcctctgggttgttcgccacgatctgaagggtcccatacttttactaccaggtcattatttcctttattaagtacagaagtaatatcgaaatagaaaggagtaaatccgcctgtgtgttcgcctacttttacatcattcacccaaacttctgctttccagtctactgctccgaaatgcaacaggatttgtttaccacgccaggcagaaggaacgtcgaaagtacgttggtaccacagttcttctttctcgtttatcattttgcctacgcctgataaagacgattctacggcaaaaggaacaagaatatcaccctggtaagcggtaggcgtaggagtacctttgggagtgattgcatatttccaaagcccgttcaggtttttccagtcgttgcgctccatgataggacgcggatattccggcaatacgtttttagggtcaagctgttctccccacgatgttttgattttgtcaccggcaggtttccattgagcaaaagtcgaactgcataaagccaatgcaagcagcattgttagaaaattctttttcatgttcatggtataaaaatatagttagttattagatataaattctattaaaaggatattgcaaagaaaggggaattaaaagtgaataaaggaaaattaccgttcaaaaaacagcaaattctcttcttttttatataaagtcccgtataaagcggctttgggtaatagagaatggaagtgatggtcagtttttgtcctttatgggttcatgttaattagcgtttgactgctgaatcgtatgaatcaatgtttttgttatttttcagctatttttgttcctgatggtttgggcaatattgttccggttttatccggtattcccagtataggcatcccatctttgtcccactctattttttgtaaacggggagtacgtgagtccattgcacccggagcatcattcggtatctgacgggcatgataaaacatataacattcctttccatccggtgaagagacgaaagaactgccgccggggccaaaaacttcattctccggttcctgctgaaatacgggtgtcggatgtttcttccaggaagcagggtccaacaggttggcattggcgtctgctgttagcaatcctacacaataatagggagtccagctaccgctggcggaataaaaaatgcatactttatctttattcttcggctgaaagaaatgaggggcttcgttcacatggatcggataggctgttttgctgccatcgggattcacccattgacactcccattcatattcaggtttggaaatcagaactctgtcggaagaaagagtccacggattttccatcgaagcgatgtaaatacattgtgtctcgctgtcaattcttcgtttttgccatccgcaccaaatcatgtaacgctgtccgttgtgttcgaaagtactcgcatgaattgcccagttgttatctttgtcggtcggtatgcgccctttcatgacaaacttaccctctgtaggaatatcagcctcgttttcaatcacataaatctggtgattgtccatattaccatcgtctgctgcgaagtaaatataccatttgttgttgatgcgatgcatttcgggggcccataagtgatgggaattgcttggatcggttggtatccataccggctttctaagactgtcattcaaatttgtaatatcactggtctcccagagcatgattctgctttcagagccttgcgtataataatatttcccttcataaaaaacagcccatggctctgctcctctttcacgtagcggatttgtataagtagctcctgttacggcttccttttccggctctgttttcttcttgggttgacaggatgcacaaataatgactaaaagtacggctagtaataacaatctgcttttcatggtatttttcatttaataatgacactgcaaagaaagcacaaaatcctgataaatcatcttttttttgcagattggttagtatttatccttaattggtttgtatttattgaatttctagttgttttttctcatctttgtggcacgaactttaaaattgatattgtatgaaactgaagcaccttattcttcttagtgttatttgctgttcccagtctgtatttggacaaaaagccaatcaacaaccgaagacgagtggcaatcctgtatttccgggatggtatgccgatccggaaggaattgtatttggggatgaatactggatttatcctacgtattcggcgccttatgacgaacagactttcatggatgccttctcgtctaaagatctggtgaactggacaaagcacccgaaagtgttatcaaaagagaatataagttggtttaaacgtgctttatgggcgcctgccgtgattcatgcgaatgataaatattatatattctttggtgcgaatgatattcaaagcaataatgaactgggcggtattggtgtagctgtggccgacaatcctgccggaccatttaaagatgcgttaggcaaacctctgattgataaatttgtaaatggtgcgcaaccgatcgatcagtttgtttacaaagatgatgacggacaatattatatgtattatggtggctggggacattgtaatatggtgaaactggccccggacttgttgagtattgtaccgtttgaagatggtaccctttataaggaagtaactcccgaaaaatatgtagagggaccttttatgttgaaacgtaacggaaaatactattttatgtggtcggaaggcggttggaccggaccggattattgcgttgcttatgccattgccgactcaccgttcggacccttcaaaagagaagcaaaaatattacagagagatcccaatattggaactggtgccggccatcattcagttgtaaaagggccgggagaggacgaatggtacatcatttatcatcgccatcctttgggtgaaacggatggaaacgctcgtgtgacctgcgttgaccgtatgtactttgataaagatggaaaaataaaacccataaagatgactttcgagggagtaaaggcaagcccattgaagtaaaatctgaaaagttcagcccatccgtaattaatattttaataaagatgggctttttttgatttattgttttatttttgtccttgtaaatcaaacatacttattacaatgaaaccagatatacacactctttccgactcccttttgtggaaaaggtttctcgagggagattcgagtgcgtatacccaaatctataatcgaacggtgcaagatctgtttcgattcggactattatatacttcagacaaagaattaattaaagattgcatacatgatgtgtttgtgaaaatccacatgaatcgtgcaaagttagccccaacagataatattgcagcttatttgacggtagcgttgaaaaacactctttttaatgcgctaaaaaaaacaacagattctctttcgtttgatgaaataggtgagagagaagagacggttgacgaatccccctccactccggaaactatatatattaataatgaacaggaaaaacaagttcaggcaaccgtgcatactatgatgtctgtattgacggacagacagcgtgaaattatttactatcgatatattaaagagatgagtatcgatgaaataagtaaggtgacagacatgaataatcaatctgtttctaactccattcaacgggctttgggacgtatccgggacttatttaagagaaaataagagagaataaccaacctatttttcctgcctatcaaaaaaaagtggaaaaaacttcggaaaaggtgagtataaaatgaaagtacaactgttattcatacgtaaagacaatgaaaatgatgaactctgaacaaaaacatacagatttttccctatatacttttgaagaattccttcagaatgatttctttatttcttccatgaatcatcctacggaagaaacacagaagttctgggatgaatttgaacagatgaatccttctaatatagatgaatatatagcagcaaaaagatatttggaggttttttcaaaagagaaagaagaagtactttcaaatgaggaaacggatgatttatggactcgtatacaggcaaccaatataaataaggagaaggcgaaacgtaagaactatttcttaataggattgagctcggcggctagtgttgctattcttgtgggatgtttcttcttattaaagagttattcttcggtgctggatccggatattgccacttttgcagtgaataccaaagctgatttgcctctgacggaagaaacactgttgattttggcggaagataacgtagtgagtctgaaagaaaaagaaacggagattacgtatgattccgtagaaatcaaaacaaatcaggaaagtatacaaaaggaaaaatcggcagcttacaatcaattggtcattccgcgtggaaagcgatcggtgttgacgtttgccgatggatctaaagtctgggtgaatgccggcacgagagtgatttatccggtagagtttgaaaaagataaacgtgaaatctatgtggacggagaaatctacatagaagtagccagagatgaaaaccgccctttctatgtgcggaccaaagatatgaatgtcagggtgcttggtactaaatttaatgtaacggcgtatgagtcggaagcaattagaagtgtagtgctggcgcaaggatgtgttcaggtagagacagcccggactccgaaagcgattttggctcctaatcagatgttcagttctgccgatggaaaggaaaatatatcacaagtagatgtagaacaggcaatatcgtggataaatggactctattgtttccaaagtgccgatttgggaatagtcttgcaacgcctgtctacctattatggtgtgaatgtagaatttgacccagcgctaagtaaaataaaatgttccggaaaaatcgatttgaaagacagctttgaaacagttattaatggattaacctttgttgcaccaatttcttatgcctatgatgaacaatataaaacgtatcgagtagtaaagaaatagatataaaaaataagataataaactaatctaactcccttattttatggtaattattgaagagagtggatgatacgaactatcatccagatgggatttgtgcgcccatgaatgtttagatacagaaaataatattatgagaaatttttaacatgtttaatatgaaaaatgcaattagagaacgaaagagtaaggttctcgggctattcctgtgctttttacttctcggaatagactactctttcgcaagttacaacaattattctcaatttaagaccctttcggtcagcgtgagtaactcgacgttgagagaagtgcttaaaacaatagagaaaagtagtcaatttgttttcttctatttagatgacgctgtcaacttagaacgtaaggtatctatcgacagtaagaataagaatatagaagaaatcctttctgaacttttcgaaggtacttcgtgtacttatcggatctctgacaggcaaatatttatttccggaaaagcccctgcttcaaccgaacagcaacagaataagcggaaaatatccggacgtgtcactgatataaaaggagagccgcttattggggtgaacgttactgtagatggagatgcaaacggttcgattacgaacatggatggtttgtatgagatattcgtaaccaagaagagtgtagtgcttaaatttacctatatcgggtttaaaacttctgaaatacgaaccaatgcctcgaccaacatttatgatgtcaccttggaagaacaggtcaacgaattggaagagactgttattgtgggttatggtacccagcgtaaaataagtaatatcggtgcacagtcttctatgaagatggaagatattaagacgccttctgccagtttaacaactacattggcaggtcgtttggcgggtgttgtggctgtacaacgtacaggagaaccgggaaaagatgctgctgatatctggattcgtggtatttccactcccaacacttcttctccgctagtattggtggatggagtggaacgttcgttcaatgacatcgatccggaagatattgaatcgttgacaacgttgaaagatgcatcagcaacagctgtgtatggtgtacgtggtgccaatggcgtaattttgattaaaaccaaaccgggaaaggtaggaaaaccgacagtgagcgcggattattatgaatcgtttacccgtttcacgaagatggtcgatttggcagacggtatcacttatatgaatgcagccaacgaggcaatgcgtaatgacggtattgctacgaaatatacagaagatcagatacgtaacacgattgccggtaaggatccttatctatatccgaatgtggattggttgaaagaaatctttaatgattggggacataatcgccgtgtgaatgtaaatgtacgcggtggtagcgagaaagtcgcttattatgcatcagtcagctactttaatgagacaggtatgacggtgactgataagaatatcgacacctatgattctaaaatgaaatatagccgttacaactttactaccaatttgaatatcgacgtaactcctactactaaggtcgagatcggtgcgcaaggttatctgggagaaggaaactatccagccatctcttctgccgatttgtataatgcggcaatgtctatctcaccggttgaatatccgaagatgttctttgttaacggagaagcctttgtgccgggaacttcaaccaataacaactttaataacccttattcacaggctacacgtcgtggttatgacaacctgacgaaaaatcagatttactctaatttgcgcgtcacacaggatttggatatgctcacgaaaggactgaaactgactgctatgtatgcattcgacgtatacaatgagatacatgtacatcaggaccgtgcagagtctacctacaacttcctggacactagtgttccttacgatatgaatggacaacctattctgcaacgtatttatgaaggaagtaacgtgttaagctataaacaggaaacgagtggtaacaaaaagacctatttggaggcttccttgaactatgaccggacatttaacgacgatcatcgtgttagtgctttattcctgttcaatcagcaatccaaactattatatccgaaagggacattggaagatgcgattccgtatcgtatgatgggtattgccggtcgtgccacttattcatggaaagaccgttacttcgcagagttcaacatcggttataacggtgccgagaacttttcgcctaaacatcgtttcggaactttccctgcatttggtgtaggatgggttgtttcaaatgagaaattctggcaacctttgtcgaaggcagtttctttcttgaagatacgttatacggatggtaaagtgggtaatagcgaagtttccgaccgtcgtttcatgtatctggatcagatgaaagaaaatggagactatggttataaattcggaccgaatggaactaagtggtccggttatgaaacagtgaatatggctgttgacctgatttgggaagaatctcgcaaacaagacttgggtattgacctgaagctatttaatgacgatctgtctattgtattcgacttgtttaaagaacgtcgtgaaaacatcttgttgaagcgtgaacattctataccttcattcttgggatacaacacatctgctccttacggaaacatcggtatcatagaaaataagggatttgacggaacgatcgagtataacaagcgtatcaataaagactgggtaattgcgcttcgtggtaatgtcacctttaataaggataaatggattcagggagaattgccggaacagaaatacgaatggatgaaccaatatgggcacaacatcaatggagtgaaaggatatgttgccgaggggctgttcactcaaactgaaatagatgatatggcacgctgggaatctttgtcggatgccaataaagccattactcccaaaccgtttgcatcacagtttggaacagtgaaagccggagatatcaaatacaaggatttaaacaatgacggtcagatagacgcatacgaccagacttacatttctcgtggggatgtgccgacaactgtctatggtttcggatttacagtaggttggaaagacttgtctgtgggtatgatgttccagggcgtagcaggagccgaacgtgttttgaacggtagcagtgttaatccgtttaatggcggtggtggtagtggtaacctttactctaacattggcgaccgttggacagaggaaaatccggaccagaatgccttttatccgcgtttgtcttatggaagtgaaacaaccagtaatattaataacttccagaaaagtacctggtgggtacgtaatatgaacttcctgcgtttgaagacattgcaggtctcttataatctgcctaaaccctgggtgaataaagttcatctgaagaatgcggctgtatatgtaatgggaactaacctgttcactttgagtcgtttcaaattgtgggatccggagttaaataccgataatggtgcttcttatccgaatacgacttcttattcagttggtattaatttcacattctaaacaaaaagataatgaaaaaatataattatataatcgttagtttgctggcgtgtctcttgacgacatcttgtaatgactattttgaccaggtgcctgatgaccgtttatcactcaaggagattttcacaaccagagatggagccttgcggtatctttcgaacgtatacacattcttaccggatgaatttaaccaacgtcaggtgcacgaaacaagtctgtaccgtactcccggtccctggacaggctccagcgacgaagcagagtggacaaatgacaataaagggaaattgataaataacaattcaatcgatgctaccgaaggaacgatggtattgtatcgctggaagagctggttttcaggtattcatgaagcggcagtatttacagaaaatgtagatcaggcaccgctgactgttacagaaagaaatcaatggaaagcggaagcaagagctttgcgggcgatctactatttttatttagtacgtacttatggtccggttcctttgcttgaaaaggacttcccgatggatactccgagcgatgagttgcaactcccgcgtaatacggtagacgagtgtttcgattttatcgtatcagaactgaaaggtgcgcaaaacgatggtttactggatgatgcttctaccgacaaagtgtccggatatggccgtattgataaggcgattacacaggcgtttatcatcgaggcattgacttatcgtgccagctggttgtttaatggagagtgcaattactattcagacttggctaatacggacggaacaaaactgttccctaacaaaccggacgaagctaccaaacgtgccaattggcagaaagtgattaatgaatgtaacactttcttctctaattacggaagtcgttatcatttgatgtataccaataaggacggtgtttctgtttccggtccggactcggaaggcttcagcccgacggaatcttatcgccgtgcagtaagaaccctgttttctgaaatgggtaacaataaagaaatgattttctatcgtttggataatgctgccggaaccatgcagtacgaccgtatgccgaatagatccggtaatacgaccaactatagaggtggtagtttgttgggagcaacccaagaaatggtagatgcctatttcatgtcaaacggagaatctcctatttccggttatagtgctgacggagtcactccgattatcaacgaaaaatccgattatgtagaagagggagtttctacaacagaatacaaaggaacagacggtaccttatatgcaccggcaggaaccagaatgatgtatgttaatcgtgaacctcgtttttatgtagacataacctttagtaattcaaaatggtttgatggaacagaaggcgattatatagtagatttcacttatagcggaagttgtggtaaagaacaaggtagcaatgactatacaagtacaggctatttggtgcgtaaaggaatggattccggcgatcgtaaccagaacttggtttgtgtgctcttgcgtctgactaatatttattttgactatatcgaagcgcttgcgcatgtcagcccgactcatgaagacatctggacgtatatgaacatgatccgtaagcgtgcgggtattccgggatacggtgaaacagtcaatttgcctaaaccgactacaacggaagaagtcatggagctgattcgtaaggagaaacgcattgagttgagtttcgaaaactgccgttattttgatgtacgtcgctggggattggtaaatgagtatttcaacaaagcaattcacggtatgaatgtcaattatgacggaaatgaattcttcaaacgtacggagattgtgaagcgtatttttgaccgtcagtacttcttccccataccacagggcgaaattgatattgataaaaacttggttcagaatacaggattctaaatactgattataaaatagaaattatgatgaaacaatatattttctctgcagtttgtctcatgtccggtgccctttgtatgtcctcttgcaatgaggataaacaggcaaagccatataccccggattacgagattgtaccggagtataccaatgcggatacctggactgcctatgaagcatttaatgataacttgctggatcccgataagaatatttataaaacaagtaccgcttatactgctgctaccgaccgtaataacggagctgccgctatctggtgccaaccgatctattgggatatggccatgaacgcatataaacgtgcaaaagcggaaggggatacggaaagagaaaacaaatacaagcagttgtgtgatgatttgtttgccggaaataaagcacattatgtaaactttgatttcgacaataataatgagaataccggctggtttatctatgatgatatacagtggtggaccattactttggcacgtgcttacgaattatttaaagtggaagagtatcgcagtctggcagaagcaagttttgcacgtgtatggtacggttctccccgcgtaggtgatacgggttcttatgcagatcctgaaaagaatttgggtggaggtatgttctggcaatggcagcctatcggcaatccgaatgaaaatgctgccggtgatggtaagatggcttgtattaatttcccgactgtggtagctgcattgaccctttacaataacgttcctaccgatcgtgtggctgatccgaatccggaaagctggagtaataagtacggtgattttacccgtccgcattatgaaacgaaggaagcttatctggcaaaaggaaaagaaatctatgaatgggctgtgaagaatctggtagacagcaataccggagaggttgccgacagcaagcatggtgaaggcaatccggcatggtcggaccatgtatacaatcaggccacttttatcggagcttcattattgctttataaagctaccggtgagaaaacatatttggacaatgcaattttaggagctgactatacaatgaataccatgtccgaaacgtacgatttactgccgttcgagagtggcgtggaacagggtatttataccgctatctttgcggaatacatggccatgctggtaaatgattgtggccagacccagtacgtaccgttcttgaaacgtaacattaattacggctgggctaatcgcgaccagacacgtaatttgtgtggtggcgaatatcataaggcacagatagaaggtgctactattgacagctatagtgcatccggaataccggcattgatgttgttgtttccggcagataaataattgtaacccataaaaaagaagaataatgaatacgaaatattcaaattggaaaatgtggtattatgtgttatgcatggtactgacacttcaattggcggcttgttctgaagaaacgcatgacgagtatactgcggctcctgaaatagaagatacctatatcgaccaactggatgcattgattgctgaaatgaccgatttgcagcaaaattcagactacggagataagaaaggacagtaccccaccgaaagccgggcaattctgacagatgcgatagatgatgccaatcgtgcggtacttttaatcaaatatcagcaaccctctccgtcggaaagtgagaaacaacgctatgtggcagaagccaaggcgtctatagaacagttcaagagtacgatccgtacagaagatgctgaaacaacaccggctgaactgtttgtggacggacgtggtgatggtggttcttatatcgatttcggacgtagcgaagaatatgtcaatttcggaaccgaaggaaatcaagcctttactgttgagttttgggtgaaagtaaccaaaggtggtggaaaagaccagaatgtgttcctgtcaacttacatgggcggtgacggatggcgtaatggctggatgatgtactggcgtaatgcagacggtggtatttatcgtgcaacttggggcgaaacaggaggaaatatctgtgaaccgtcactaaaggcaccggaagatggagaatggcaacatttcttgtttgtgtacagtgataaaggcttgccgggcagtccggagcttcgtgcgaaattatatgtgaacggagaagtgaaaacaaccgaaggaagcgtgggtagcagattctataattcaagcaactatgccaactataatgccccgatgactgctttcggacgttatatgcgtaccagtgataatctgtttgaagaaggctttgccggttatatgaagaaaatccgtatctggaagagcgcaaaggataacgaatatgttcagaattcttataacggaacggctgaagtgacgggtaaagaagcagatttggcggcagcatgggatttcatgaccaaaccttccggttcgggtaatgaagtaatagacctgacaggtcgtcatactgctaagattatcggtacttacgagtggcaacgtattgttgaataataatgtaaaaacgatgaaaaacatgaaatgtttaactaataaatggagagagggagcaatgctcctctctttcctcctgatttctagtctggcagggatatttaccgcttgtgacgatattgaagacgagtatataacagatacacaattaagtatcttacaggaaagtcgtgcgtcattgaactatttattgaagaattcaacctacggaactgctcccggaacatatcctgaaaccggaaaggatatattaaatgctgctattaccgagttggatgcactgataacacgggtagaagctggtgaggaattggatgaaacaactttggaagctgctgtagcaaaggtaaatcaagcgattgacgagtttaaaaattcaaaatattataatctgtctccggaagcacagcaatatatcaataatttactggctaaggcagatgaaatacttgcaatcgttaatgatgaaacgaagtggggaaatcatcagggacaatatccggtagaaaataagtcggttttggagagtgcagctaaagacttggaaagtctggctgaaagaatcaaatccggttccatcacagatatgacgcaggagatttatgatgaggctattgctgctgccgataagaaagtagaagaagtcgaagattctgcatggccggataacagtcagattacctggaatctgtttgtagatggaaatgccggttcctatatagactttggttatagtgaggattatgtgaagtttggagaggatgacaatcaggtatttacgattgaactttgggtgaatatcaaagaatattgcaataaacagggagaagacaactgtactttcctttctaccatgacaaacgatccttattggagcggatggcgtgcccaggatcgtacgaagggattgttgagaacaatggttgctcactggcaagataataatcatacaaatccacaagaatgggaaccgggatggaaaaagtcggacaactggaccaaagatcgttggacgcattatgcattcctgttcagggataagggattgccgggatttgatactccgacagatgtgaagtgttattccatgattgacggtacgaggcaaggagatcctattcgtgtgggtgagtcttggagaacgtatatcaatgaacaatccatagccaatcagattcgcatgacgggattctgtatgatggacaaaaatggaaatcgtaacgaatggttctccggttacataaagaagatacgtatctggaaaacaaatcggacagaaaatcaggtatatgcttcttatatgggtaatgaagaaggtgtaagtgccgataatccgaatttggtagaagcctgggattttgaagtgaaaggtgatcagcctactcaaagtgctaccagcacaataacaggtttgaaaggccatacggcaacattggttggtgataactggcaatggattgaatccacagatattacagataacaaataattgtttaccggaatgagttttcaataggtagattaaatattccccttatctctgtcataaggacagagtgaggggaaattattctccaataaccctttattaatcctttatttttattgtagaaaagtgttttggtctgtatttgttctttattgaataaatattatcgttttttttcagctatttctgcaatctttgtaacaggaaaaatactataaacttataaactatcatgaaaagcaaaattcttttggctctgacactactattgggagtatcaactaccacatgggcagtcggtaatttaggaaaagcaaaccagaagaagcatgtgtatacgaacgaagatgtatgggcagcttatgaaggatttaataatacactactagactccaataaatatatttacaagacaaattcgtcctatccaagtgctgttgaccgtggcaatggagcagcggctatctggtgtcagcctatttattgggatatggcaatgaatgcctataaactggcaaaggcacagaaagacagaaagaagacaagttattataaaacactctgcgagaaaatattcgcagggaacaaagcgcaatattgccagttcgattttgatgataacaatgaaaataccggctggttcatctacgatgacatcatgtggtggactatcagcctagcacgcggctacgaactttttggagtggatgaatatctgaaactctcggaagctagtttcaaacgggtatggtatggctcggaaaaagtcggtgataccggctcgtatgacaaagaaaacggaggtatgttttggcaatggcaacccattcaaaatccgaaaccgaataaattcggtgatggaaagatggcatgtatcaactttccgacagttgttgcagcattaaccctctacaataacgtgcctgaaaatagaaaagaatcgaccgacaaacggccggattatcagacgaaagctcaatatcttgccaaaggtaaagaaatctatgaatggggagtggaaaatctcttggataaagcaacaggaaagattgccgatagccgtcatggaaatggcaatcccgcatggaaagcacatgtatacaaccaggcaacctttatcggagcgtccatactgctttataaggcgaccggagagaaacgttatctggacaatgctattctggcagcagactatacagtgaaagatatgtctgcagaacataaagtgctacctttcgaaggtggtattgaacagggtatctatactgccatctttgcggaatatatggcatggttggtgtatgattgcggacaaacccaatatctcccgttcctgaaacgtaccatcaaaacaggttgggcaaacagagataagacacggaacgtatgtggaggcgaatactataaaaagttgccggaaggtgcggaaatcgacagttattctgcttccggtataccggcattgatgcttttgtttccggctaagaaataaatagaaaacgacggaatttgcgtaaaatagattaaataaacaggtgatttaaattatgaaacaacaactgatgatgctgttactgggaacagcttctgtattttgtagctgtgagacccaggtagaacagcacgagaagaatgaattacgtgctccggcatatccgctggtgacaattgatccttatactagtgcatggtctactacggacaatctatacgacagtcctgtaaaacattggacaggcaaggatttttctttacttggtgttgcaaaagtagacggacaaacctaccgtttcatgggaacggaagaactggaactacgtcctttggtaaagacatccgaacaaggtagctggacaggaaagtataccactcaacagcctgctgacggatggcagaatgccggattcaatgataaagcctggaaagaaggcgaagctgccttcggaaccatggagaatgaacatacagcaaagactcaatggggtgaagaatttatctgggtacgccgggtagctgatattcaggaagacttgacaggaaagaatgtatatcttgaattctctcatgacgatgatgctattatttatatcaacggcatcaaggtagtggatacaggcaatgcttgtaaaaagaacgaacgggtgaaactgtcggaagaagtagtagcttctttgaaaccgggtgaaaatctgattgcaggttattgtcataaccgggtaggaaacggactgttggatttcggattgctggtagaactggacggttaccgttctttccatcaaacagcgcaacaaacttctgtagatgtacaacccatgcagacttattatacatttacttgtggtccggtagatttgaaactgacatttaccgctcctatgttcatggataatctggacttgttgtcacgtcctgtcaactatatctcttatgaagtagcctccaatgacggaaagaaacatcaggttgaactgtatttcgaagcatctccgcaatgggcaatcgaccaacctcaccaggaatctgttgccgacagctttactgacggcgatttgttattccttcgtaccggaagccgcaatcaggagattctgaagaaaaagggtgatgatgttcgtatcgactggggacatttctatctggcagctgaaaaggaaaacagcacatctgcaatcggtgacggcagagagctgcgcaagaacttcgtagccaataaactggaagctcctaccacaaacggttatgataaactggctttggtacgttcattgggcgaaacacaaaaagctgatggccacctgttgatcggatatgatgatatttattctatccaatactttggtgataacctgcgtccttactggaatcgtgagggtaatgaaacgattgtttcccaattccagaaagcagagaaagaatacaagacacaaatgaagaacagcgctgctttcgacaagaagctgatggaagaagctactgctgccggtggacgtaaatatgccgaactttgtgcattggcttatcgtcaggcattggctgcacataaactggtacaggctccgaacggtgacttggtattcctttctaaggagaacttcagtaatggttccatcggaacagtcgacctgacttatccgggagctccgttgcttttatactacaatccggaattggtgaaagctaccatgaaccatatcttctattatagtgaaagcggaaaatggacgaaaccatttgctgcgcatgatgtcggtacttatccattggctaacggccagacttatggcggtgatatgccggtagaagaatcgggtaatatggtagtattggctgctgccattgcaaaggtagaaggtaatgcagattacgcacagaaacattgggaaaccctgactacgtggacagactatctggtagagaacggacttgatccggccaaccaactttgtaccgatgactttgcaggtcactttgcacacaatgccaacctttctatcaaagcaatcatgggtgttgcttcatacggttatctggcagatatgctgggcaaaaaagacgtggctgaaaagtacacacagaaagcgaaagaaatggctgccgaatgggtgaaaatggctgatgatggtgaccactatcgtctcacatttgacaaaccgggaacatggagccagaagtataacctggtgtgggataaactgttgaatctgcaaatcttccctaaaaatgttgcagaaacggaaatagcttactatctttcgaagcaaaataaatatggtcttccgttggataaccgtgaaacatacacaaagaccgactggatcatgtggacagctacattggcaaatgacaaagctacctttgagaaatttatcgaacccgtatatctgtttatgaacgttacacctaaccgtgttccgatgtccgactgggtatttacagacgaaccgaatcaaagaggcttccaggcacgttccgttgtaggtggatattatatcaaaatgcttgaaggaaaactgattaaataaaacaaaaataccatgaagaaactagctctattcgcttttacgttacttagtgcatgggctatgactgcaaaaacaattaccggaccggtggactacgttagtccgctggttggtacgcagtcaaagcacgcattatctaccggaaatacttaccctgccattgcgctgccttggggaatgaacttttgggttccgcagactggtaaaatgggcgatggatgggcgtatacgtatgacgctgacaagatcagaggattcaaacaaacccatcagccaagtccctggatcaatgattacggtcaatttgccatcatgccggtaaccggtaaggcagtatttaatcaggatgagcgtgccagttggttctctcataaagctgaaacggctactccttattattataaagtatatcttgccgatcatgatgtagtgaccgaaattgctccgacagagagagcagctgctttccgtttcactttccccgaaaacgaccactcttatgtagtggtagacgcctttgataaaggttcgtttgtgaaagtaatcccttcggagaacaagattatcggttataccactaaaaacagcggtggtgttcctgccaactttaagaactattttgtactagtattcgacaaaccgtttacttatacggctgccgtagccagtggtgtgattgacaccaacaaactggaagcgacagacaatcatgccggtgcattgatcggtttcaaaacccgcaagggcgaacaggtaaatgtgcgtgtggcttcctcttttatcagccctgaacaggcggaactgaacctgaaagagctgggtacggacaacattgaacagattgctgcgaaaggtcgcaaggtatggaacgatgttttaggacgtattgaagtgaaagatgatgatatcgatcatttgcgtaccttctactcttgtctgtatcgttcagtattatttcccagaagtttctacgagatagatgctaaaggagacgtgatgcactacagcccttataatggtgaagtacttccgggatatatgtttaccgataccggtttctgggatacgttccgttgtcttttcccattccttaacctgatgtatccatccatgaatacgaagatgcaggaaggattggtgaacacttataaagaaagcggattcctgccggaatgggcaagtccgggacacagaggttgtatggttggaaacaactctgcttccgtagttgccgatgcttacctgaaaggattgaaaggatacgatatcgagacattgtgggaagccgtgaaacatggagcgaacgcagtgcatccgaatgttcgttctaccggacgattaggacatgagtattataataaattgggatatgtgccttataatgtaggtattaacgagaatgcagcccgtacactggaatatgcatacgatgactggtgtatctatcaattgggcaaagccttgaagaaaccgaaaaaagagattgaaatctttgcaaagcgtgcaatgaattataagaatctctatgaccctaaacataagttgatgcgtggcaagaatgaagacggtacgttccagtctccgttcaatccgttgaagtggggggatgcctttacggaaggtaatagttggcattatacctggtcggtattccatgatcctcaaggtctgatcgacctgatgggtggtaaagacggattcaaccagatgatggattctgtatttatcctgcctccgattttcgatgaaagttattatcgagccgttattcatgaaatccgtgaaatgcagattatgaacatgggcaactatgcacatggcaaccagccgattcaacacatgctttatatgtacaactattccggccaaccctggaaagcgcaacattggattcgtgaagtgatggacaaactttatactcctgctcccgacggttattgcggtgatgaggacaacggccagacttctgcctggtatgtattctcggcaatgggattctatccggtatgtccgggtacggatgaatatgtcttgggtactccctacttcaaggagatgaagctgcatctggaaaacggaaagacggtgactatctccgctccgaataacggagacgataagcgttacatttcatcaatgacattgaacggtaaagaatataccaaaaactatctgactcatcaggatttgttgaatggcgctagcatttctttcaagatggatgcgaaacccaatcagcaacgtggtaccaaagagaccgatttcccttattctttctctaacgaatttaaaaagaagaagtaatcatgaagaaacagatcaaatatatcagcgcaggtatgctggcaggtatgcttctctgtggcggggagctgcaagcctccaaccgtatgacggaaatgcatgtatgtctggcggatgctattcagaaagataaccgcccggaaatatccaatcgtttgttccgttccaatgcggtagagaaggagattctccgtgtacagaaacttttgaagaatgcgaagttggcatggatgtttaccaactgtttcccgaatacactggatacaaccgtacatttccgtaaaggaagcgatggcaaaccggatacgttcgtatatacgggcgatattcacgccatgtggctgcgtgactccggtgcacaggtatggccttacgtgcaattagctaattcggatcccgaactgaaagaaatgctggcaggtgttattctccgccagttcaaatgtatcaatatcgatccgtacgcgaatgcttttaatgacggcgctattcctgacggtcattggatgagtgaccttacggacatgaaaccggagttgcacgaacgtaaatgggaaatagactctttgtgttatccgttgcgcttggcctatcattactggaagactaccggagatgcgagcatatttaacgaagaatggattcaggcaatcactaatgtactgaaaacattcaaagagcaacaacgcaaagacggagtaggtccttataaattccaacgtaagacggaacgtgcactggatactgtgagcaatgacggtctgggagcaccggtgaaaccagtcggtttgattgtttccagtttccgtccttcggacgatgctactacgcttcaattcctggttccttccaatttctttgccgtatcttctttgcgtaaggcagccgagattttggagaaggtaaacaagaagacagctttgtccaaagaatgtaagaacctggcgcaggaagtggaaacagcattgaagaaatatgcggtgtataatcatcctaaatatggtaaaatctatgccttcgaggtagatggttttggaaatcatcatctgatggacgatgccaatgtgccgagtttgcttgcgatgccttatttgggtgatgtgaatgtaaacgatccgatttatcagaatacccgccgttttgtatggagtgaggacaatccttacttctttaaaggcaaggcaggcgaaggaatcggcggaccgcatatcggttatgatatggtgtggccgatgagtattatgatgaaagccttcacaagtcagaatgatgccgaaatcaaaacctgtatcaagatgttgatggacaccgatgccggtaccggttttatgcacgaatctttccataaggataatccgaagaattttacccgtgcatggtttgcctggcagaatactcttttcggtgagttgattttgaagttggttaatgaaggaaaggtagatttattgaatagtatacagtaatatgctgacatagtaaattgaacgcggataacgcggatgatgcggttctttttctggtgcaaaatcagaaaaaacgtgttatccgcgtcgtctgcatctaaatatgaatagctgaaaactaatagttaaaaaccaattgtatcatgaaaaagttatgtgtatgggcagttgccgcccttttaatggcagcttgtactccgaaagctgaaaaggctacagattccggtttattgcagagtaaattccagacagaagtagatggaaagaagactgatttgttcactttgcgtaacaagaacaacatggaagtttgtatcacgaacttcggtggacgtattgtttcagtgatggttcccgacaaagacggacagatgcgtgacgttgttctcggtttcgattctattcaggactatatcagcaagccttcggatttcggtgccactatcggacgttatgccaatcgtatcaatcagggacagttcactttggatagtgtagaatatcagcttccccgcaataactacggtcattgtctgcacggcggaccgcaaggattccaataccgggtgtttgatgccgaattgctgaatccgcaggaattgcagttgacttaccgtgcagaagacggtgaagaaggttttccgggaaacatcacttgtaaagtgttgatgaaactgacggacgataatgccatcgatattcaatacgaagcggaaacagacaaaccgacgattgtaaatatgaccaaccactcttattttaatcttgaaggcgatgccggcaacaactccggtcatttgttgatggtggatgcggactattatactccggtggacagtaccttcatgacaactggcgagatcgttccggtagaaggaactccgatggatttccgcaccccgactccggtaggcgaacgtatcaacgactatgatttcgtacagctgaaaaatggcaatggttacgatcacaactgggtattgaacacgaaaggcgacgtaacccgtaaatgcgcttctttgaaatcaccgaagactggtatcgtactcgacgtttatactaatgaaccgggtattcaggtatatgcaggtaatttcctcgatggttcactgacaggaaagaaaggcattacttacaaccaacgtgcttccgtatgtctcgaaacacagaaatatccggatactccgaacaaagcggaatggccgtcggctgtacttcgcccgggcgaaaagtatacaagccaatgtatcttcaaattctctgttgataaataggttataaaagcagttcatgccattgaagaacgggttgtctgattagagattatccgttctttattttaatgtaatttgttagtgctcaattgggttcatagggaaattaggatgatttccggaagtagtagaatagacgaaatgaaaaaaaataaaactaaaggactttttgcatcgatagtgcttggagtggtggttacagcttgtgcgtctgcttcctccagtggtacggtgacagtagtggaccgaccggacatacagtccgtcaataccaattacatcgggtatcgcgctccgcttcgaccgttgaattttataaagttgccggtaggcagtattcagcccgaaggctgggtgaagaagtatctcgaattgcagcgcgacggtctgaccggacatttgggggagatcagcgcctggctggaaaaggataataatgcctggttgacaaccggtggcgatcacggttgggaggaagttccttactggctcaaagggtatggcaatctagcatatatcctgaatgatccgaagatgattgaagaaaccaaatattggattgaaggtgtatttgccagttgccagccggatggctatttcggtccggtcaatgaacgtaacgggaaacgcgaactttgggcacagatgattatgctctggtgtctacaatcttattatcctcaaatccgcaactacgcgcctaatatgatacagaagcgaaaagaatctgcatcgttagtaaaaagggggcacagtgcatcgaatgtcaccataaagacatataaatgccccttaccccaccatgcgacttgaggcaatacgcaaaatcacgactataagttgtcggtgttatccaaagtcattctggaacacattggcataagcattgttgcatgaatagatattcagcacatacttccttgatgtcctgacccatttggctggcacagagatgaacttaaagacaaacgtcttgatgcggcttgttgctttgagtccgaacctcttcacgtcaagcctcgccatgatgaatttatagaagttgcgtatgagtgccataagcagaagaaacaccgtgttttctcccataaaggattttggaagcctgttccagccgaatccgttattcatatcatcgaagatgcgttccttccctccacggaggttatagaattcgacaatctctttctcggaagactcgtagtcatttgtaaggatgcagcggtaggtgtattctccttcccacaggtcgagttcgccgtctatccgcttctgtctttgaatcacaagacggtatgccttccctttccatttctcgatgagaatggaggccagctcaaactcaatgccgcccaattccactttcttccaacctctgagggcaaagatgtcattgtagagcgaactgcatcggttagcacggatatagaaggtcttgcagtgtttagcaatctcttccactatctcttcagaacacgagccgcaatcagctctgaaacggttgataataagcttgttttgttcaaacctttcaaagaacctcttcagcgtgtccttctggtggaaacggacatttgtgttgccgtcgctgttctcaatgccgacaatcaagttgccaataaccgccacgccagggcgataaccaaggaacttcttgtatgtaggcttcgcatcaaacttctcagcctctatgaactggtggtcgaagtcaacgtcatacccctcgccctctttcagctgccctgtggacaataggcaattgaggagcagtgtattcagcttgtctgccgtgttgaagtcgtaggtcttgccagtgtcggatgtgtaggaaatgttatcctgggtcagttcctttatggctctaagaatcgtgtcggcactgcatgtgcgaagtgtcggatgaagcgaaaggtggtacatcagatgagtggtgacatcctcgatgcatgagccgccacaaaaataaacgctcataagcgaacggatgatttcgctgtattgataaccatacagcctgcatctcataccgagggttgagtcgattacagatgagagtctggagtcaaattgctccattattgaaaatattcctccaaaaggagtgagtttctcggatttaattgctacctttgccatgtctgtcgggtttgatacatattttgatttgcaacactaagataggtgaaaaatctgacatggcaaattcctgagcaactttttgttgctcaggtacttaaaaagttatttttgtaatagtgttgcggaattaaggattatgagtattctcaggatcagcgtgtcattgacctgatgacgaattacttcaagtggcagatgaccgttcccgacgaccagcttctggaagattattgggagaaaagccgtggcggtgataacatcatcagtatctactggctttacaaccataccggggatgctttcctactcgaattagccgagaagattcaccgtaacacagccgactggacgaaatccacctccttacctaactggcacaatgtaaatatcgcccaatgtttccgtgaacctgccacttattatatgcagaccggagattcagcgatgctgaaagcctcttataatgtccatcatctgattcggcgtacttttggtcaggttcccggaggtatgttcggtgcggacgaaaatgcccgtctgggatatattgatcctcgacagggagtggaaacctgcggcttggtagaacaaatggcttccgatgaaatcatgctttgcatgacaggagatcccatgtgggcggaacactgtgaggaagtagcgttcaactcttatccggctgccgtgatgcccgatttcaaggcattgcgttatatcacttgtccgaaccatgccatcagtgattcgaagaatcatcatccgggcattgacaatcgtggcccgttcctttcgatgaatcctttcagcagtcgttgctgccaacacaaccatgcacaaggctggccttacttcaccgaacatctggtattggcaactcccgacaacggagtggcaatagctatttatgcagcttgcaaagctacagtgaaagtgggtgacggcaaggaaatcactcttcacgaagagacaaattatccttttgaagaagctattgcctttactgtttctaccggtgaaaaggtcgcttttccgttctatctccgtattccttcatggactcaaaaggcggaagtgcgggtgaatggcaagaaggtaagtgcagctcctgtagcgggaaaatatctttgcatcaatcgtgagtgggcgaatggtgatcgtgtggaattgactcttccgatgtctttgtctatgcgtacctggcaggttaataaaaacagcataagcgtagattacggacctttgactttgtctcttaagattgcagagaaatatgtagagaaagacagtcgggagacagctatcggtgattcaaaatggcagaaaggtgctgattcgaaaaaatggcctactactgaaatctatccggatagcccctggaattattcattggtattggataagaaagaacctttgaagaatttcaaggtaatccgtaaatcctggccgactgacaactatcctttcacagtagccagtgtacctttagaagtaaaagctatcggtcgtccggtacctgaatggaagatagacgaaacaggactgtgtggcgtattgccggaagaagatgcggtgaaaggtgataaagaagaaataacattgatccccatgggtgcggcacggttgagaatctctgcgttcccgaacacaaaagaataaattaataactagaaaacttagaataaatgaaacgtattgtttttttagattacatccgtgtgtttgcatgctttctcgtcatccttgttcatgccagtgaaaacttctactgtgctcccggagccactgatatggcagggccgcagtcttttttggcaaatgaagtagaccggttatgggtatcagtgtacgacggtttttcacgtatggcagtacccctgttcatgatagtctctgccttcctgcttgcaccgatgaaggaagagcagtctatgtggcaattctatcgccagcgctgtcttcgcatccttccaccgtttttcatattcatgatactgtacagcactctacctatgttgtggggacagatagacggagaaacatctatgaaggacttgtcgcggatattcctgaatttcccgacgctagccggacacttgtggtttatgtatcctctgataagcctttatttgtttatcccaattatatccccctggttgagaaaagccacggctaaagaagaacgtttctttatagggctgttcgtgttgtcaacctgtatgccctatctcaaccgttggtgcggtgaagtgtggggacaatgtttctggaatgaataccacatgttgtggtacttctccggttatctgggctatctcgttctggcacactacattcgtgtacaccttacatggaaccgttccaaacgttttattataggaactattttaatggtgatcggtgctgtatggactatttattcattctatgttcaggctatacccggcgaactccattccacccctgtaatagaaataggatgggctttctgtactattaactgtgtgcttctcacaacgggtacattccttatgtttacatgtatcaaacgtccgaaagctccgacgctagtgacggaaacatcgaaacttagttatggtatgtaccttatgcacatattctggctcggactgtgggtgactgtgttcaaagatacattggcgcttcccactgttgccgctataccatgtatcgcagtggttacgtttatctgttgttttgtaacaactaagataatctcgtttataccgggcagtaaatggatagtaggataaatatccggaaacaataagattttgaatagaaaatcaggaaaaacttgattatctattcaaaatcttattgtttatagcttatttccctcttaatatcctctttctcttttcacctctttcacccctttgtaaacagtttttccccagcttcttacgggtgaaccctccctctgtttggagctttatgccgctttcatcggtttcaccaaatacacgttcccatatttggtatgtttgcgggtgacccctgccgcaagcaaaacttgcgcgaacgtagccggattacttccacgcatggcagcggggttatacatcttcagtctcctgaatatgtccgaagccgagagccgttcgcttccctcttcatcatctttagctatccggaagcaggcatgaaagacttcctctgccggacacggatgataaaaagcagcattgtggcgttgcagttcccgttcctcttcttttgtgaaccaatagcggatgccggagagcagttcagctttcagttgggcatagatctgatcgtgcatgataccttcgcagtcgatcagatgttctgcttcaatgcagatgaatcgccggctaccggtgggatcggtgagcaagtcaaaacggttgcttgtaccgatgaaagaagcgatgcgcggcaagttgcggaaattcttttgataagctttgcagatattcaggtttgccatttgcatcagattcttcaataatggcatttgctgcgttccgtatttgtcaaattcatccatgttcaggagtcccatttcggcaagtaacctttccggttttccttgtgcagacagtttcaggttgtccatgtaataacgtgacagtgccggcggcatcagtgccttgcaaaatgtggatttttgtcgtccctgctcgctgctgacaagtatgggggctacgctgttggcatgtattcccgtcatgcctaaccattgggcggtgagtcccagcatccaggtatggaagctttttatccagagctgattgtcagagacacgctgcgccaaagcttccagtctgtctgtcccatcccagccgggcagttcttccatgtaaagtcggaaaggatggtattcaggaatacaagtggaataaatgtaacggctcaagtctttatcccagcaggatatgccctggtcgtgtgcttccatgcagaaagtgttcagttcccgcttacttacaggttcgaaaggaacggcacgtttgttggcaggacgatattccgtttcttccgtcaataggttgtaacgaaaatcatactgtttttgcaggaatgtacgtacttcttgcgtcaggcggaccggttgtttttgttccgtctctttcttttttccagtaggcggtgcagtgtctggcaggggagcagtatatatatcttcatgaccttctgattctggcgttttcagttgctcttcctcggttttctctgctgcatcttctttgttcttcttcatttggaacaattttagttccttcaatacctgtctccatatcaatgttattgcattcattattttttctgttttaaagtgattaaaatcggtttattgttcagcgctgatactgcgaatgtactataggatgaggtcggtttgcaagtatttctccggaaaaaatattaatttctacgtatctgaagaagtcggcttcttatcatccttttctctattttttatcgtatctttgacgaagagttattgatgattcactttcgtggtccaatcaaatgacaagagtgatctaattggataacgactgtgatttgaatgaaccacggtagtggtttaataataaacttaaagtttttacatgaaatatattcactatcaaaacgttaactactaatggctatactttacgattggtatgagaatcccggtgagtccgatgattcggaagagaaaggtttgcatccccgcatttttttgaatggtaaggtgggaacggataaactgtgccggatgattcacggacgcagttcgctttccgtaggtgatgtaaaaaatgcgttcgagatgcttgcccagatttgtggtgaagaactgcgcgaggggcgtgaggtgcatattgaaggacttggctattttgctccaatcttgcggagtacacaaaaagtgactcgcagcactaagaacaaatggttgaaaatggagttgaaaacaatcggttttcgtcctgatgcccgtttgcggggggagttggtaggtgctaaagtcagccggagcaagtatgcacgccattcggaatccttgtcggaggtagagatagatatgcggttgaaggaatattttgtcgatcatgatgtaatgcttcgttatgattttcaggaagtatgctgcatgacacggactacggcgaatcgtcatctccggcgattgctggaagaaggtaaattgcgaaatatcggcaaacgtatgcagccgatttatgtggctgcagcgggttattacggggtgtctcgtgatgtgcttcggcggtaaatggaaacgatttgagtaagcgtcgatttgaagtgtgtcggtgaaagtggtgaaagcgtgatagaagggcttttgcatggtcgctttcacccgctttcctgctctggacagaggtttcgggaagaaggtggaagcggtgaaggctgtaatcatttcgtatgataatatagggcttttttgtttttcggtaaaaatatagaggtcgattaatgatgtaaagatacttttttcttatatttgtgattcaagagcacaagataaagagaatgatgaaacagtctatttattcttttaaacaattactgtcgggaggcttgctttgttgcgcgattctgttggctgcttatatatttcaggcatttttccctgaaatgtatgttgatgcgttttcatcttccatacatctttcaatgtggctgacactctttgtgggagcattattgtggacattccgtgagagggaggcacatggtataccttccgaaataacggactggcagtgtatcgctgcttttcttttaattacagcagatcagatatatgtcgttatgccaaaagaaatacatcaggaggtggcaccggcattgtctacctatacaattcctactttagtggttgttggcatattgatagccggtataattaagtattcgattttattatatcaaaaattgcagaatgaacggcaacaatctattattcaatctcaaaagttacagcaattgctagcttctcctttatctacccaaagaggtatttctttagttcgtaaattgatagagaataaatctattgctcaattgtctgcccaagactatctatcattggtagaagggtgtagaacgatagatcctgactttttttgttggttgaagtcgcaaaactttcagcttcctccacgagatattgtgttatgcgtattgatccgaatgtataaaacaaaagaagagattttgtcagttctatgtgtaagcgacggatcttatcgtactatgcgatcacgtgcccggaaacgtttagggattatagataaagaattggaggcttttttactggagattaattaactcttctcttatctttatgtgtctaatatttctattagtttgacgaaagacttaattgctgcaagcattcctgacatcgctgcacaataaaaccatactcgtttattagaatatgctttttctggcatacatttgattgcgcctattgttagtatgatccatgaaagaaaatcgaagaaatggatgagaaacagttgaagaatagaattgatgttatctataaaaagatctagataacacatggtaatgcagacagcgcatgtactgcaataaagtataatatagcgaatcattgttattgattatttatacaattctcataatctttatttgctattcttatatttgctttatatactgctgtttctttcaagtaacatggtgagagaggacccatgcccttacagtttgtagctatggcattatcatactccgtttttgcttgttcgtatgctgcttgtctcaattcttcacatttactgtttccatttccttctttgcgtgtttttaatatctttctttttgctagcccacgacttttggcatattgcctgaataataacaaccgttcctcttcactcaatcttaagaataccgtacgttcaagcaagccttttttagcttcatccatttgtcggagttcttcttccagattcgcttttttgatgaaatcttccatatactcatcatcattcagactttccatgagtttgtcatattcttcattatttagtttggatgtataagcactaaacttgtccgctaattgttcactacatctttcaaattcataaaactcgtctgaattggcaacggaatctatcaatacatttcctgtattccaagtttgagagaccaagctgcgtgtttgggcaattgagtttacttttgttgctgtctcatttgtatagttgtattcatcggtgctacaactataaataaggaatatggtcaataatattccaaacagtgtaattacgtatatgctactctgttttttgttctcgcttttcatgtcttgtttataatttaaattgggaaaacaaagaaagggattttacagcaattagatggaacgttttgttcaaaaaatgaaataatttgttcaaatagctgtttgatgactacaataactcatatatcaatgttacaatttatatataaaatgacttttttagggctctatatgcccgataaatgcctatatgacagggataggagtgtaacgctctcttgaatggcatttgttatgctcgtatctttgtgtaaaaataatattatgaaagcaatgacaaagctgattcctattatttgcctttttgttattataggcggttctcttttttattcttgttcacaagagaagaaagaggagactgctattgtacttccgttggatgcagctttgtcacaggctggagaaaatcgtgttgaacttgagaaggttttacatcgttatcaatccaatccatcggatagcttgaaatatagggcagcttgtttcctgatagagaatatgccatcttatacctattataaaggtaagctgctggaacaatacctcactttctttactctcttgcaagaagcgcggagtaaaaaggtatatccacaagcaatggtggattctatcagaaggatgtatggaccgttctctttagattctttgcaatattgcaaagacgttttgatagtcgattctgcttatttatgtaataacattgactgggcatttaaagtttggcaggaacagccttgggggaagaatgtatcttttgctgatttttgcgagtatattcttccttatcggattggtgatgaaacattaagctattggcgtgaggacatttatcgaaagtataatcctttgcttgattcgttgcgtgcttccacggttcttgatatagaagatccgcttgttgctgcccgttgtttgtgcgattctcttcgtaaacgtagccgcttctttacaactacggttccgcaaggacttcctcatgtagggccggagattgctcaaagcgtttcgggcagttgtcgtgaactttccgattatgtcgtttatgtttgtcgtgcgttgggaatcccttgtgccatagattttatgcctcttcatggaggtgggaatgatgggcaccagtgggtgtcgttcacagataaatatggtacgctttattttcaagagtatccggataagataaaagaagtccgtaaggataagatgtgtggggcttcgaaaataaaggtttatcggaatacgttcagtcttaatcgtgctatgcaggcggaaatgcaacgcttggatacggctgttgtacctttcttccgagatccgcatatcgttgatgtgacagccgattatgcaaagacatacaaaaagaaactggagattcctgcatctatgctttattcgggaaagccccattcgcgtatagcttatctttgtggcagtagccgcatggattgggagcctgtggcatgggcggaatttgatggtgaacatcttgcttttaacgatgtccagatagaacccgtcatgcggatagcaacttacgaacggggaagacttcgttactggactgatccttttgaaatgactgtttccggtgaatttcatgtttttgctccgtcagatagtgttcaggatgtaacgctgtttgctaaatatcctttgtggcaagatgagaagtatcagaaacgtatgataggaggtgtttttgaaggaagcaatgatccggattttcgtcagaaagaggtgcttttcctgatagaaaagcaacccgaacggttgcggacaatggcgtattcccgttcattgacgccttgtcggtatgtccgctatatgggaccggaaaaggggcattgtaatgtggcggaaatagagttttatgaagcgggtggactgttgccattaagcggtagaattattggtactcccggttgctatcaacaggatggctcgcacgaatatacgaatgcattcgacggtaatactgaaacgtcttttgattatacggaaccttatggcggctggactgggctagacttaggtacgccaaaggtgatagataagataatttatacgcctgccaaccgggataattatgttcggtcgttggatgactatgaattgtcttattgtacaaagagagggtggaggacattaggacagcaaacggcgatgttggattcgctggtttacaggagggttcctaaaggagcgttgctgctgttgcagaatcatacacgagggaatcaggaacggatatttgtgtatgaggagggaaagcaggtgtggaagtagtaagttgctttacatatttattaattttaaaagtacattgttatgagagaacgattggttaagagaaatgtaaaacataaaacattacagccgatttatatgaagaattttattcaatggtttattggtatattcgtattaatagcatctttcattggctgtcaagcaacaaatgatgaaacagggaaaattactatttcagcggaagaaaggaagcttaatctacaggcaccaaatggagaatacctggcaggtggtgatcttgttcggttgaaaaaaatgttagctccgtgtattggtacgatagagaaggatagtgtggtctacgattttgaaatcttgagtattcaatatgattctttgcattatggtttgattgcagatattgaatttgtaacgaagagtggctatcacaaccatctcgttatggagtatgatggaaaagaggaatcgttgagtaatacggatgattgagatgtaggatattatgatagtagtaggtgttcatttgttttatagaatgattatgagaagaggttgtatattagcattattctgtggaaatgaagataaaaagaaaagtcctgattgttacatttcaaaaacttcagtaagaatattgttactgtagaatcatgtacgaagaaggcaggaacgaattttggtgtatgaagaaaagcaaatttgggaataggcctaaatatagtgtatgtgattggtgatattacttttaatataataacttaaatataaaaatatgaagatgaaaagaagaagttgctctcttggatttaaagtggtgtttatgataatatttattatgtattttatgcaaagttgcagttcggacactgtaatctctgacgatttattctgtatgactgttatgactaagtctaacgattttatagaacctgaacttacacataaggatagcatattggttgactctataacaaagttggatgagtttaaatcatatgctatggctacccggcaattgataaaaaaaattcagcctttaatggaatcagatttatgggataaagaacctttgggtgagtatcagaataggaaagactcaataaatgctcttgttttgaaaataagtaaacataaagacatacaaaacgattggaatagctatgtggaaagttacaagtcgttcattaaattaatggagaacgcacaactttctagtaccattaaaacaatattagttgtgaaagtgattacatcttcggatgattagtagataatattttgttgcagattgaataaaactggtaaaataattttaatgtataaatagtatggaaatgagaaaaaagagaactaatttgtgtttcttaactttaattgttgcggctttttctgttttgttggttcatggttgtagcttttctgaatatgatttggtagtagaagattcttctggtatggttttagaagaggcaaactctacgcgggctttatcagaacaaaattgtagaaatgatcttgttatttcagtttctgagtctgaagaatatttagattatctaatgagtctgcatatgttttttgataaatttgatagctattactcatctttaaatgacaaagaaaaaatacagttagaagaaaatttgaataatgatgattatattgaagatattattgatgaaagttgtattaggaatgaattggaacaaatgataaacgcccaaaatcagttgaaaaatacagcttattttcatttgaataagttagagaggagtatgcttatctcattagactgcacgtatatacataaaactgtacttctaaaaacaaggggagagggtgacgatgctaggaaatgtgcagaaataagagataaggctatacaagccgcctctgatttagcaataaaagagaaagaggcttgtgatgatgcttatgagtcaggaactactgtacatgcatattgctattttaaagctgctaaaaaattttcaaaagctaaagaagaagcaaaagaagaatatgaaagatgtataggaaagtaatggagaaacttatcttcaaaaagaattgatgaaaagtacgtctcctttactgaaggatatgtataaggcatatgttgctaccggaagtttgcacattacgattgcgtatggaaaattacgttccaatcaatatggctgtttagatgcttttgaaacagatcaagacgtacaatttcttgttacttggattttctggcaatatttgtgctattgcgtgaatattgattttatgactggagaagacaaaacgaagttatatataggaagataagaagtataaatttaatttcatcaatagattggtgataaataattttttatgatatgaacagactgaaaatttatttggaaatagttttggcattgatatttatgtcaagttgtggctcttctgctaaattagcaaagaatcatgatgaaatgaagagtgattcaagaatatcggattatctcaacatcagtaaaagagaacgtgcattagttgattctattgtagcattgaatgaatatgctgtatttcttgattcattccagaaatatttgacaaaaaagaatgctatgcgtaagggcgaagatgtggaacaaacgaaagagtttgcagaatatgtggcagcgtgttctaaaatacaaagaatcacatatgagttaaagttaagtaaagatgcatctattgctgtgtttgagaagatgtatgaagttgctaataataaataaattgaatcgttatgaaattatttaaaagtgtttttggagctattttggtagtatcatttttgcagattggttatagttgttcttctgattttcatcgttttaatgatgagttggatgaaattaaagtagatggagcaacaacaaggggaatggctggtcatcgtatgtctcttgtagactcagtagcggagactgatgagtttgtggaatatatgatagctctcaattctttgtataaaaaatctgatgaatatttttctaaattgagcaaacaagaaattgagatgttagagtctacagcaaaattgaataatgttgaagacgtagatgcgggaataggttattcagacctttatcaagctttaaaaagcgagatggacatggtggtgagaacagcgagaattttgcatgaaaaaactgattacttaagattgaatgatgatgaattgaacactttatttagggttcagactcttacttcaaggcgggtgattaagaagagtagaagttctgaaaatgatcgaatacaaaaatgtgcagcagaaagacaagagaggtatgaacaagcagagctagaagctagtagggctatgggagaatgtgcgctattgaaagatgattgggaatatatgcaatgtatgggagatgcgatagttgctcgtaatgcaaagtgggctcgggctgatgaattatatgaagattgtataaaaggtaaatgatttgataaaatcgtaatgcgcccaaatgatagactggtaatcaataggggtaaattggtttgttgttgacgtttgtaagagtattatttgatactcttacaaacacaatgatgttgattaggtctttttatatttagaattagggtgccgtgatcaagaataatggttatttgcaaattctatacaggagtgaatgaaacaataaatgtgaataaggagaatatgaaaagaagtatttttttattccttctgggaataatgttgtttgtttgccagacaaaagcatctacaataaacgatgtgtctgctatagagacagaaatgattaattttttccgttctacattgcaacgtaactacggcagttctgacggaaaagcagtaaagttgatgatggatgctcttctgcattataaatttcattatattattgatgtggataaggaggctttgaaagctattaatgacaaactttatccggacatgtttggtaactattttgtagagactaatgagcatccgattgattcgcttcatacgaattggaaacggtacgatccttatcatattatttgtggctatgaattcaaaaaacaactgaatggagaaacttattatcagaaggaactgtcacaggctacatctcctttatttaaggaaatatgtaatgcgtatgaagcaaccggcagtttaccttttactgtcgttttgggaaagttccgagccaacaatcatcaatgtttggatgcttttgaaacggatagggatgttcagatgcttttcacttttttcttttggcgttatttatgttattgcgtgaatattgattttatgacaggaaaggataaaacgaagttatatatagatatgagaagataagaagtataagtttaatttcatcaatagacggtgataaatcattttttataatatgaacagacagaagatttatttgacattagtcttggcattaatattcatgtcaagttgtggctcttctgctaagttagcaaagaatcatgatgaaatgaagagtgatccaagaatatgggattatcttaacgtcagtgatagagaacgtacattggttgattctattgtagcattggatgaatatgctgtatttcttgattcatacaaaaagtatcggacaaagaaaaatgctatgcgtgagggcgaagatgtggaacaaacgaaagagtttgcggaatatgtggcagcgtgttctaaaatattcaggattattgataagttgaaattaagtaaagatgcgtctatcgctgtgtttgagaatctatatagagttgctaataataaattgaattgaatcactatggcatctgtataagagtagatagaacaagtgagacaataaagaatatgattcaggaagataaaacgtcaactaaaaagatgttgtcgactaagaataacatttatataggactatgtatcttatatatattgttatcaatgataaacaggaaatatccgataggggatgtaacgctgcatatcgtttatctttcaacttggttttttcttttattatgggaaattgtagatgtacttataaataaaaagaaagattttgggtgcataattataatttcgatggtgctggttacgtccattgcaaatatgttgaggtagatagaaacaaaatgataaaagatataaatttaatatatgcgaaaatgaaatatacacggacattattaattattgtatttgcttctgttgtccagctattttacgggcaagaaagatacacaatcagcggtgagtttccagatcattctttggatggtgagtatgtgtttctatatgaacattcagctcttgttgaagaacctgaacgtatgaagcaagcattcaaagataccatattggtagttggtaatacattccattacgaaggaacgctcaagcggaaaccttttttggtttctctctcttgcagtaaaggtagacagtttcgttataatacctctttcgttatagaaccgggggatattcaacttcgcattgttgattggggaagtgaggggaatgtttccggtgctcctattaataatgattataatgcgtacattatcgaatgtaaaaagcaagtagacaagatgctctatttgatgagaaccaagcgggaagaggaagcgatgaaaagtgatgcacgtctaaatgcgttgtttcgagatgcgtatatacgttccacagaaggtcgtttgctttttggagaaaaatatgcccaatatcccgatgttattcgatcttggttggctatgtatatagaccctattaatcaaactgcgggagatgaggctattttatcgcgattcttgtatgttgtcgatttaatgcctgaggcagaacgcgatattcttttagcttggcgggagtatagaaccgagttgcaagaacatatggtaaaggccagggccttgagagacagtctggaggctaaaaggcctcgctttattgaggttgttcctaattgttcatcatcaacaacggaaaaattatgataggatatgaaatagctattaatgatcagtcacctgtggttgtcacgtcacctgacgtggtatctgtcatggtgcatagcaattgctctttcggtgatagtatttatgtaggaggcttgtatacttcgagaagaatcgtttgggtagatgaaaaactgaaagtgggagatagagtccggataaaggttgttgaagtgtcagcggtatctcctgttgtgaagatgacctatgatcgggaagaattgaaggcaaaatacgaacgactcaaagccgagcttggggcaaagggacttatatagaatattgatatgaaagggcttttagtaaaaagcaaagataaaattagcaaggctggcattcctcaaaatggaattggtcttgttggtaatattacttggcatagtggtgcgtcttggagcgttggtggattgcgggtgtccgatgagatgcatttggtatgggacggaggactattggaagtcggagatgtgatagaagtggaagtggcagaatttgatgaggcttcggcgcctgtttgggaggaaaaacattgctgtccgacacgaacggcatcgaacaacactgataatccgaaggaatgggaacataaactggatctctactaccgattgaaaaaggtattggaggatgagaacttgatttaataccaagatagaaatgataagactctttcatattttgtttgccgcagcatgtataggcagtatgtttgtatattcccaccaatttacagacgcatatattgtgcctaaatggtgctgcattttgtttgtgctgttatggatgctggtgtgtgctgcatttttggcattgcagcgtaaatccatagtgacggatatgacgatatgggggagtatcattgtttccagttgttggttgcaggctgtttatggaatattgcaatacgtaggtttgtttccttctcatgcaaccttccgtgtgaccggtagttttgataatccggcaggatttgccgcctgcctttgtgccggattgccttttgtcgtttttttgatcatacatagaaataagtatattcgatatgctggatggctggcagggggagtgatggtattggcagtatttttatctcattcgcgatccggcatggtaagtgtcattgcggtatgtgtcatgtatttgtgtggaagattcgttcatgggagattatggagatatttattatcggtatctataataggattgttaataatcggctcctattggttgaaaaaagattcggcagatggtaggttgttgatttggcggtgtggtttggaaatggtgaaagatgctccttggacggggcatggcgtcggaagtttcgaggctaaatatatggactatcaggcggactatttcaaagaatatggttcgcaaaatcgctatgcaatgttagcggataatgtaaagcagccttttaatgaatatttgggagttctgattaatttcggtattgtcggattggctttgcttttgggtatggtgggggcgcttgtgtattgttataggcaaaatcctacacaagaaaagaaaatagctctttatattttgctatcaataggcgtattctctttcttttcctatccgtttacgtatccttttacgtggatggtgacatttcttgccgttctcatgttgactgctgattatttgaagcggataaagataggtacatggggcaggaatataatatattctgcagcggtgatgggcttcttttggggacaggttaggctgggcgcacgtacacagtcggaacgcagttggcaggaggcttcggagttagctttttgtcattcgtatgatgaggcgcttccgtactatgtgagtctgaaacaccgattcgaagataatccttatttcctgtataattatgctgctgttttcacggaagccaaagaatacgagaaggctttgaaggtagcgttggagtgtcgcaagtattgggcagattatgatcttgaattattattgggtgatatctatagagaaaaaaaggattataaacaagctgaagaatactatatgagtgcttcgtatatgtgccctagtcgttttttgcctctttatcaattgtatgaactgtataaatgcataggtaatacagagaaggcttcggaattggcaaagatacttttggaaaagcctgcaaaagtaaattcggcgttgataaggaaaatacgatatatggtgaaaaaagatggataatatataaatcaataaatatagtaaaatgtaaaaaggtgagttcaagagtcggataatgttataggcgcattaagaaataattagaatatatacctacaattttagatgtgatatgcttatgatgaaaaatgaaataatagatgtattatgaaaaatatagtaatgagatttatattattagtggtattaatattaggaggctgccatatttttattggatgtcaacagcaggtagacgattttgaagttaaatcagtattaccttatttgtctatagaaggtgatcttgataatttgaatctgtcgaagggtgagatgaaaatacttttcgaagcattagggcgaataaatgttgaagaaaaagatggtttatatcagttaaaggagaaatctggtgctgaaataaatatatctgaaaaattatataagttcttttctgctaaaatagaatatgagaaccaagtgttgatttctactccgttggtatacttaagacctcgtacaaggactattgaggaatttggaggtgataaggaaccgactgattgtgtggcacatacgattgctgatgttttaggacattatggaataaatgattcttttaatgatgtttcgtcgtggattgaagatgggtatggggaaaatggtgtgccaggtggcagttattatgaagtaatggattattattttattggggagcctataagtattcctaattatcacgatgactattcgtttattgatgattcttcagttgttgtagtaggggttattggtagaccggaaggtggggttgctcattctgttgaaatattgaaaatagaaaataataatgtaatttataaagataatcaaaacgatggtcaatggcgttattgttgtattactgatattagatatttatatagaattgatggtgtacgggaatgaaaaagaattataaagtcatttttcttttctgcttattactaggcggaatgttctctgatgcttcagcaaagagaaaaaactccttcgtaagaaaagatgaaatattttcttattattcgaagtttgtttccgaagtttgggatatctcgtggaagaaaccgaaaggctttacggatttgatgaagagcgagacgtgggcgttcggcaagaaagacccttattctttattttatcggctgaccgttgagtcagtcgataaggattgtctcatcatgtatcccgaactgaagatggtgacgtctttccctgatattgcatggacggaaaaatgtggaaaaccggaatttctgagaaattatgttatgatggaggtcggtgattctttgattgaagaacgactgacggtgttttccggaactgaggctccgatgaatgcagatacggtgttcgtgttccgcactgcattgaagaacgtttataaaaggtattcatattgtacaagcatctatgcctacaaggaaggtcgaccgcctatgatattccgttgcttctttacagaaaagggaaaggcaaaagaaaagcgatatctttcaaagttctgcaagtcggtcaactacggaaacaacaaggaatggaaaatggatgctgataaaatgcgtgaggcttcttcccggatattctattcgtttacgaacgcagagcggaaggggctttttagtgagtatcaggtggagtgtgaacgagactttcatataaaattgagtatgccggcaggatttgagaccattgataaaatggttccattcagagtgaatgaaggaagaagcataggctcattctatcgtgtagcgttggaatcagaaaataaagattgtttgattctatatccattctttattaaaaatagacctcatggtattgcaaaaaatatggcttatggtgaagtaatggcggcattgaacttagcaccggaagaggatgacgagatgggaccgaatctggtgaatggcaaatttgtgctttcaagaagaaaaaagacaagccgcaataaggaaacggtacagttcgacacagcccgctatatgagagtgatcgcagaggagaatatggagaattattgcaatgccgatacggtatatgtatatgaagttccgttattgaaaccttataaaggagtctataagaaatgtatcgggataaatatggtgaaagaggggcatccgtatggaatggcaaaaatccttctgatggaagggggcgatgcaagagacaaatatatgaaacagcttttcgaaagcatacattacagtgatgttgcatcgaactataaggcgagaatgaaaccgaaaaaacaataaaagaaataatgatgagaaagtatatcctttatttgttagctatcctgttggcagcctgttcgaaaagtgttccttattctgacgaaactattaaaaacgacttgcgtgtacctgcttatccgctactgatgctccacccacatctgcgtttatggtcgacaacagatcagctgacagagaagaatatgatttttactaatgggaaaaatcttccttttgtcggtttcctgcgggtggacggaacgatgtatcgctttatgggtagacgtgaactacctatgcaagccattgcaacaatggcatacgattatgaaagctgggaaggaaagtatacctctcttagaccggatgaaggctgggagcaaccggattttaatgatcaatattggcaggtaaatgaaggtgcattcggtacacgcgacagacgtgaaacgagaacgcagtggctttcaactgatatatgggtgcggagggaaatcgtggatattgatccatatttgcttgagaacaagaagatttatttgcgttattcgtatgatgacatagttcaattatatattaacggaaaactagtcgtaagtgcggaccgtgcggcggcaaatttaaaagttgagttgccggattctatcttgaatacaatgaaggaaggaaaagcccttattgcagctcattgtgagaataaaaaaggtagtgcattgattgatttcggcttatttgcagaggagtcgggaatattggtagaaggcatagctcccgtttctaatgagaaggaatggattgggaaatatacaacagaacaaccggaagagggttgggaaatggctgcttttaatgatagcacatgggcacaaggaagcgctgcttttggcacggaaggcggaccgagtgttggtactccctggaataccaataggctatggattagaagggaagtctcattcgatccttccttagtgaaaaatagacaactttttgtgcgttattcgtataatgacggtatgcaactgcttattaatggaaaggagcttgttcgtacaggaacgaaggcacgcaacgacgtgaaagtgcagatcccggattctatcttagaaacaatgaaagatggaaaagccttgtttgcggcccgttgcgtgaattggggaggtacttccttcgcagatttcgggttgtatggtgagctgaaagaagccgggcaaaaatcagtggatgtgcaggctacccaaacacattatatttttgattgtggagatgtggaattgaaactgacatttacggctccttatttattggatgatttggaactgttaagtcgtccggttaattatatttcttatcaggctaaggcattggacggtaaggagcatgatgtcgctatttattttgaaatggatcctcataaagcctttcgtgccggacagtctacggagatgtatgaaaaagacggttgggtgatgatgaagaccggtcgggagaatcagaagttatgggtggataagctgaaggatgctccggcctggggatatttctatttaggagcgaaagagaatgttacttgtgcacaaggggacgcggcagagatgcgggcgcattttatgaaagaaggtgatttgaaagaaatgcgtcggtcgaatgaaaaacgttatgcggcgatagcacagaagctggaaatgaatagtgagtttccccaacatctgattgcggctttcgatggattgtatacaatggcttatttcggtgaggatctacggccttattggaataaggacggagataaaacgatagaagggttatatgaagacgcagaaaaagtatataaagaaacaatggcaaggtgctatgcttttgacaggcaattgatggagaatgcttgccgtgtcggtggtaaagagtacgcagaactgtgtgcttcggcatatcgtcaggccgtttcgtctttccagatgtctaagaattcgagtgatgagttgctctattttaccacgttggtgggttcgctggatatttattatgctgcttcaccgctatttctttgttacaatcccaatctgctgaaagcaatgttgaatcctttcttttattatagtgagagtggtaaatggaataagcctttcccggctcatgatttgggcggttatccgtttgtaaacggacaagcgaaagggggagatttaccggttgaacatgccggaaatatgctgattatggtggctgctatggctaaagcggaaaaagatgcatcttacgcaaaggctcattgggagactctctccaaatgggcgggttatttgatggagaacggggttgataccgataaacagattgatactgacagctttgccggccgctactctcataatgctaatttgtctgccaaaggaattctaggtattgcatcgtatgctcttctggcaaaaatgctaggtaaacaggaagatgctgaaaaatatttggcaacagcaaaaagaatggccgaggaatgggagaagcaggcttctgacggagaccattatcgtttggcttttgatcagccggatagctgggggcaaaagtataacttgatttgggataaactccttgaccttcatgtctttccggatagagtcgtagaattggagacagccttttataggactaaattgaatacttacggttgtccgttgcatagtaaaactgattatgcgaaagctgattggactgtatggacggctgcattgcaaaatgaccgactcatgtttcgtgagtttattcttccgctttacaattatatgaatgaaaacaaatggcgtgtaccaatggcagacacttataatgttgtgaatcagaaaacaagagttacatcatggggaagaccggtaacgggtgcctatttcataaaattattagaggcggttttggatgaaaaaggtaataatatcgtttcaaaagatgaaatgaattgttcaaagtagccttgataaaataggtgcttgaatgttataattatagatgaataggggatatttcgtttgtctgtatcttacagagagcgtgaatggtaaccttatggattgtaatatactattgaatgatgttggtttaatgtatatctttgtatagcaatacaagatgaaacatggaatcaatataaatcccataaataaaatcagataattatgaaaaacattttccttcccaaagtaacgatgtgtataattgcactgcttgctttaattttaccagtttctgcacaaaatacaaatgtgacagatgagtacaaagaagcgttgaagaaaatcatggatttttctggtacttcgactactacggatgactttttccagaaattatcatctataatgaaattaaatgcgccgaaaaaggatgaggcttattggaatgagttctctaaaaattggaaagagaaagtagaaaataaggtgtttgaaatgtatatgcctgtttatgaaaagcatttaacattggcagaattaaaagctgttgctgcattttatgaatctcccgtaggtaagaaatataaagaggcttcattgatggttatgcgtgagacaatgccgctgctagtggagcaactccagacagagatgtccaaagagataatgccggagaaaagtgaacgagtaaaaagaggtgaacagcggttgaaagaatatgagcaaaagcagaagcgtgataaagaattatatgcacaagcctatatgcttccaagcgatagtctagttatagttcctgaagaagtgtatgagaaagcgtatgagaatgggaggtctacaagtccttctttatattcgattgaaaggagaaagaatgatactaaagtgacattcatacaacctatttattgggattggcaatggttgtattatagtccgggatttaagattatcgataagaaaagtggcgatgagtataatgtgcggggatatgatggtggagctccgatgggtaggctgttggctgtcaaaggatttaatcataaatatatttatatcagtcttttattcccgaaactgaagaagagtgtgaaagaaatagatattcttgagttgccgcacaaaaaagataaagaacagttaccttctaatgatgatggaaagtctaaatcatattttaatataaaggtgaaggattatcaggtcgtttccgataagaaaaataagaagatctattattagttcaaatgattattagaatttgaaatgataatagcaggtattgaacatgagtgtgaactgtttttttgatataaacttattccgtatgagaaaacgaattatgattttatgcacgttttgtgctattgctatattttcttctgcccaagagaaattctctatccgaggtattgctaatgaggaattgaataatcaattgttgtatttatgcctgatgggagatggagagaaagccaaagaagtcgttttggacagtacaacagtggaaaaaggtaagttctctttttctggtgtacatcaaatgccggatattgcaatcatcaaggatatggatggagaaacctatccgttgattttcgaaaaaggagaaatatcagtaaatattgctgcgaataagagagggggaacgcctttaaatgattcattgaatatagctttaaaccgtatgcagctaataatggataatatgttgaaaacatcagatagtatttataagttaatgactggaatgaaatctgaagaatttgctgataagatggtgaatgatactgcatttagagcaagatatgataaaatagagaagaaatttcttgcacaaatggattcagtatcacattgtataaaggattataagaatagtatagtgggtgtatatcttttctccgttggaggtatgatgatgccttttgatgatatgaagattttgatgaaagaagcttcgcctatgttttcacaaaataatttggtgagaaatattgtggaaaagaagaaccaagcagagctccgaatgaaggcggaacttaaaaataaaatgactccggaacagcgtgaagaacaaaagaaacggcaggaaatggatgccaagataaagattggcgaacgtttcccggatgctaaagtgaaagacaatgctggcaacatgaagctcttgtctgattatgtgggtaaaggaaaatatgtcttgattgacttttgggcctcatggtgtggaccttgtcggcatgaaatgcccaatgtgaaagctgcttatgaaaaatatgcttctaagggatttgaggtgattagcatatccacagatcgaaaactgaaaccttggagggctgctgttgaagaacttggaatgaattgggtacaattgttggatgtggatgcttctgatatatatggtatctatgctatacccagaactttccttgtagatcctacgggaattgttatagacaaaaacttaaggggtgaaaaactggaggaagctttatcgaagttgtttgaataatcgttgctttgtttttattgtatgggtgaattgatagttgagaactatataataggataaccactatcaattcaccaatgacttttattaaatcagaagtccgtccaatagctctaaataaagtccgatcgcttcttctatttcttttaacatgatatattcttctgccgtgtgtgaacgtgacgaacgtcccggaccaatttttaccgatgggaaggacattaaggcctggtcggacaatgttggagaaccaaaaggaacgcgtcctaacttcatagctttctgtacaaatgggtgcttttcgtcaattcgtgaagaattgaggcggaatgaacgagcttgggcttcacaggaaatatgctttttgatttcagcaaacaattcttcatttgagtaaagctcgttactccggacatcgacgatgaaagtacatttatcgggaatcacattgtgttgtgtaccggcattgatgacagtgacactcatctttacgggacccaacaagggtgactctttctcaaaacgataatcacggaaccaggcaatgtcgtccaataccttgtaaatagcattgtctccttcgttacgtgcggcgtgtcccgccttacctgtggcagtaacatccaataccattaatcccttttcggcaatggcgggttgcatctctgtcggttcgcccactatggcaaatgagactggaggaagtcccggcaatacgctctcaattccgtcttttccagaaacttcttcttcacaagaggccagataaatcagattatacttctgcgaagtgcgacatagttgcaggaacacctgtaataacgaaacaacgctggcaccggcatcgttacttcctaatccatataacttaccgttttcttcacgtggagtgaacggatctttccgccaaccgttaacaggtttcactgtgtctatgtgggagttaagtaaaatagtaggcttcttcaaatcaaacataggactaaagcaccacacattatttcctttacgtcccgtctgcatacctgccatttcaatatagttttgcaggaaatccgcagcttgggtttcttcccggctgattgaaggaatactaatcagtgatttaagcaggcttacagcctctgttgtcatatatggaatatcatatttcatagtgcaaatcttttatctatatcttaatctttgcacaaagatagtcgttttgagcaatagtttcaaataaaactaatacctttgtaccatatttactaatacaaagagtatgacttatcatcatttatctgtcctggtccatcgtcaggccgaaaaatatggcgacaaggtagccttaaaataccgtgactatgagacagctcaatggattcctatttcatggaagcagttctccggaacagtacggcaagcagctaatgctttcgtggcattgggagtggaagaacaagagaatatcggtatattttcacagaataaacccgaatggttctatgtagactttggtgcatttgccaaccgggcggttaccattccgttttatgcaacgagttcacctgcgcaggcgcaatatatcattaatgatgcgcagattcgttttctttttgtcggtgagcaataccagtatgatgccgctttcagtatctttggtttctgttcttctttgcaacaactgataatctttgaccgttcggtggtaaaagaccctcgtgacgtatcatctatctattttgatgaatttatggcgacgggagagggattgcctcataatgatacggtagaagaacgtacggagcgggcttcttatgatgacttggcaaatattctctatacttccggcacaacgggggaaccgaaaggggttatgcttcatcattcttgttatctggaacagtttcatacacatgatgaccgtttgacgacgatgtcggataaggatgtatcgatgaacttccttccattaacacacgtgtttgagaaagcatggtgttatctctgtattcataaaggagtgcagatttgtatcaatctccgtccggcagatatacaaacaaccattaaggaaattcgcccgacactgatgtgcagtgttccccgtttttgggagaaggtgtatgcaggggtacaggaaaaaataaacgaaactacagggttgaagaaggcactgatgctggatgctatccgggtaggtagaatccataatctggattatctgcgtctgggaaagactcctccggtgatgaatcaactgaaatataagttttacgaaaagactatctattctttgctgaaaaaaacaatcggtattgagaatggtaactttttcccgactgccggtgctgccgttcccgatgagattaatgaattcgttcattcggtaggaatcaatatggtggtaggatatggactgacggaatctacggctactgtatcttgtacactgccggttggctatgatatcggttcggtaggtgttgtactgccggggattgaagtgaaaatcggtgaagacaatgaaatcctgcttcggggtaagacgatcacaaaaggctattacaaaaaagcggaagccacagctgccgctattgagccggatggctggttccatacaggtgatgccggttactttaaaaatggacagcttttcctgacggaacgtattaaagatttattcaaaacatcaaacggcaaatacgtcgctccgcaagctttggaaacgaagttggtcattgaccgttatatcgaccagattgccattatcgccgatcaacgtaagtttgtctcggctctgattgttcctgtatatggatttgtgaaagagtatgccaaagaaaagggtattgaatataaggatatgacggaactgttgcagcatccgaagattgtaggattgttccgtgcccggatcgatacacttcagcaacaatttgcgcactatgaacaaatcaaacgtttcactttactgcctgagccattcagcatggaacgtggagaattgactaatacactgaaactgaaacgggcggtggttgccaagaattatagtgagcagatagagaagatgtacgaagaaagtgagaaataggcgataagcggtttatcgttaaaaatgaaacgataaaccgtaaataataaatcggaaacaataaagagtgtattggagctctctttaaaagtattacccctgttacagttcaatttgtaacaggggtaaactttgtgtttaggggggggctttgacacctgctaattatttatggccggctcgtttctttttagtatccgaaaatctgttcttgggtcaattcttcaataggacctacagctttcaatttatccagctccaaatctttcttatctcccaggatgcaataaacatacgtacgtccttttacccattgcttttggaaatcgacaatatcttttagcgacatattctgtatgtcgttgtagagcttgatgcgcgggtctacgttttgccctaaatcttgtgcattgatataactccagataatgtcacctttgatgatacgttcggtgcgcagacggttggttaatccgtctttagccagtttgaaagcagcttcggattccggcatattattgatgatgtcattaaatgtagtgacggcatcaatcattttgtcgttttgcgtggcaatctgtgtacgtagtacatagggatacttcaagtagctcggcggcattatgctagcccaggcggaataagccaatccacgtgtttcacgcatttcctggaagacgatagagttcatgccccctccgaagtattcatcatataatgcgcggataggttcaatggcaggatcatacttcttatcgagattggatatctgtgccatgtatatttgcttggcgtcataaggagctactagaactttagtaacgggagtttcgagataagcatactcgtttccggcaggaatatccttcaggattgccggaacctgatgatattggttgatggtagccagtaaatctttgctgctgcttgggccgtagtataaaatacggtgcttgtagctgttctgattgtgaatccggtctaccagttcctgtggattcatatttgtcagttccgcctccgtcagtagattggtggcaggggatttgggaccgtacatggcaaagctcatcaaacgggagaagttctgtccctgattcagtttggcgtccgaacgggctttcagtatatcgctggtcatattagtataggcttccttattaacctgcgcatctgccagtagcttttcgaataattgtacggcagcaggcatattctcattcagtccggaaagtacgacatacgtgcgttcgttacccggagaaacatagaaagtacaagccaggcgatagaattcacttttcagttcttccggtgtcatgtccgaagtaccgagatattcgagataatcgaatgctgttcccaaagctttgtcatggttgtttcccatatcaaagacataaatcaattggaacaggtcattggctacattctgtttgtaaagaatcggaatatccgattttgcctttaattggctcatatccttttgataatcgagaaacactggttcaatcggtttaactgcgctttcctgtacctccacaaggaacgggctggctacatcacgattggttatgataggagtaatctccggtttcgtcatcttcttttcgttcgggtcttttccttgctttttgtagataacggcataattatcttctttcaggtatttgttggcgaacgctacgatgtcttctttggtcagtttggccatgcggtcgatggcagtaacttcatttttccagtctgtgccgttaataaatgagttgacaaacatatcggcacgtccttcgttgctttccatgttttgtagttcaccgagcttgaagttgttgatattggcttccagcattttctcgtcgaactctccggcacggagctttttgatttcgctgagtagcaagtctttcacttcttccagtgtttgtccttgtttaggaagtcctcctagcagcaatgcagagtaatctgccagtcccatcgggtaaccgtaactattcaagaccttctgttgctggttcaggtcaaggtcgataagtcctgcctttccattgtataatacttgcgaaacgacttgcaggatttcaaaatccttgtcggatacaccggggaatctccaagccaatgcaacgctttcggcatccggacctaacacctcttttacaacaggttgcgtgattggcgcctctttcggaaggtccagtttcgggagttccggattgggtttcaatccaccaaaatatttatcgattaatgcaattgttgcatccgggtctaaatcgccagacatacagattgccatattgttgggcacataccattgtttatagtagttcttgatattcgtgatagaaggattctttaggttctcctgtgtacctaacacagtctgcgttccataaggatgcttgggaaaaagagaagaaaaaatagcttcctgtactttgctgttgtcacgggtgagtgacatgtttttctcttcatatacagcttccaattcagtatggaaaccacgaattacattgttttcaaaacgatctgcctgaatcttcgcccagttttctatctggttggaaggaatgtcttcctgatagaccgtctggtcataccaggtataagcattgctgccggtagatccgatggctgccattaatttgtcatattcattagggatagcatacttggaagcttcgtaagaaaggctgtcgatggtgtggtagatcgccttacgttccgcttcatccgtagtcttacgataaatttcgaactgttgttcgattgcatccagcagaggcttttcggtcgcgtagtcttttgtgccaaacttgtcggtgcctttaaacatgagatgttcgaaataatgggcaagtcccgtcgtttctgccgggtcattcttcccgcccactcttactgcgataaatgtttgtatgcgcggagtttccttgtttacggtgaggtaaacctttagtccgttgtccagtgtgtaaatgcgggcttttagcgggtcattgggcactgtttcgtagctatacttcttttgtgagctacagctgcaaatcactaatgccaggaagagtgacaagcaagaaagtttcaatcgtttgttcataatatgacaacattttaataacaaaaacaaaggtagcagaattttgcttatctttgtccccgatatctgaaatttgtaaataataaaattgtaaatcaaatgattactattgaacaacttaaagacgtgaaagagcgcactgatgcgctgaggaggtatctttgacatcgacgggaagaaaattcaagtcgaagaagagcaattaagaacacaagctccgggattctgggatgaccagaagagagccgaagctcaaatgaaactggtgaaagacctgcaaaagtggattgagggttacaacgaactcaaaacgctggcagacgaactcgaactggcatttgatttctataaagaagaactggtgactgaggaagatgtagatgctgcttatgcaaaagccagtgaggcggtagaggcactcgaactcaaaaatatgcttcgtgatgaagccgaccagatggattgtgtgctgaaaatcaattcaggtgccggtggtacggaaagtcaggactgggcttccatgttgatgcgtatgtatctgcgttatgccgagacgaatggttataaagctaccattgccaaccttcaggaaggggatgaagccggaatcaagacctgtactatcaatatcgaaggtgactttgcttatggttatttgaaaggagagaacggtgtgcaccgcctggttcgtgtttctccgtacaatgcgcaaggtaaacgtatgacctcttttgcttctgtgtttgttactccgttggtagatgacagtattgaagttaatattttgcctgccaatatctcttgggatacgttccgaagcggtggtgccggtggacagaatgtgaataaggtggagtccggtgtccgtttgcgttatcagtataaagacccttataccggtgaggaagaagaaatcctgatcgagaataccgaaacccgtgaccaaccgaagaatcgtgagaatgcaatgcgtcagttacgttctatcttatatgataaggaattgcagcaccgtatggcagaacaggcgaaggtggaagccggtaagaagaaaatcgaatggggttctcaaatccgaagctacgtatttgatgaccgtcgtgtgaaagaccaccgtaccaactatcaaacctcggatgtgaacggcgtgatggatggcaaaatagatggttttatcaaagcttatttgatggagttttcttcacaagaatcataaaaaataaaattagcaagaattatttttggaaagttaatagatttgtacttactttgttagcgttgaactttaaagctaactattatgggtaaggtgaagaaaaaagtagcaattagtaagaaagaagaagaacaagcccagaaggttgtcaaaatagtgttcgtctcattaattattttggcattgattatgctgatcgcattttcctttttcggctgataagttcgccacaaattatacggttaacccagattgtttggttattgataggataaatatcaaatccgatctgtgttaatctgcgtaatttgtggcgaactctttgttttgtaatgcatttgtgttctctgtaatataaatgtaacttttctgtcattttcccgtagttaatttgtcatctccgtgtatcctcacagttgtacttttgccgtgaatttagtagcagacaactgaaatgagtagaatcagaacaaccgtcgtcatgcttttgctggcgacaatggcctttggacaggcaaaagaagatgcaggggatggtaagatgctggataaacagaccatggagtttaaggattatctgccggagattcacggaacaatccggggaaagtacgaataccagacagaaacaagtgaaagccgttttgaagtacgtaatgcacgcttcagtgtttcgggaaatgtgcatccgatagttgcttataaagcggaaatcgacctttccgatgaaggctctatcaagatgctcgatgcgtatgcacgtgtttttccggtgaaagacctgaattttacgattggtcagatgcgcgttcctttcacaatagacgctcaccgttcaccacatcaacagtattttgcaaatcgctcattcatagctaaacaagtaggaaatgtgcgtgatgtcggtttgacggctggttatacgaataaaggtggcttcccttttatccttgaaggaggattattcaacggctccggtttgaccaatcaaaaggaatggcacaaaacgctgaattattccataaaagcacagctattacctaataagaactggaatctgacactcagcacccaaatgataaaaccggaaaatgtgcggattaatatgtacgatgccggtatctattatcagaatgaccgttttcatattgaggcggaatatttatataaaatgtacggtcacgaagcatttaaagatgttcatgcagtgaatagttttattaattacgatttaccattaaagaaagtattcaataaaatctcctttctggctcgctatgatatgatgaccgatcatagtgatggcaagatggatgaaacgacaaaagctctgattataaatgattatgcccgacatcgtgtgacaggcggaatcacattaagtctttccaaagctttcattgccgatctccgactgaacttcgagaaatatttctataagaactccggtgttccaaaagaatcggaacgggacaaaatcgtgattgagtttatgacgagattctgaaataaattgagacttgaaaattgagaattaagaattgtagttttctgatacatgatgtgaggtatcaaactatcattttttaattctcaattttcaatttttaatttatctttgtgccatggcacaggaaatagaacgtaaatttttagttatcggtgaattcaagtcttcggcttttgcgcagagtcatattgtgcaggggtatatcagtagtgctcgcgggcgtactgtccgggttcgtattcgggatgaaaaaggttatctgacaataaagggagcttctaatgcttccggtaccagtcgttatgaatgggaaaaggagctggccttatcagaagcagaagaattgatgaggctttgcgaaccggggattattgacaagacccgttatttggtacgtagtggcaaacatgtatttgaagtcgacgagttttatggtgagaatgaaggacttattgtggcagaagtagagttggaatcggaagatgaggcttttgtaaaacccgactttatcggtgaggaggtaacgggcgacatacgctactataactcacagctaatgaaaaaaccgtataaaacgtggtgagcgttaacaaataaaccgtatatttgttcttatataaaaaagagagcagtgtatggatatggaacagttgtacagttatgtgccgcgtgaattggttacttttgttttagtaaccttgttttctttattaatcggactttcgcaacgtcgaatcagtctgaagcgtgagggggaaactactcttttcggaaccgaccgcacctttacctttattggtatactgggttacttgctttatatcttagaccctacggatatgcgtctgtttatgggaggtggagcggtattgggattgctgttgggattaaactattatgtaaagcaatcacaatttcatgtttttggtgtaactaccatcattattgccctgattacttattgtatggctcctatcgtagctacccaaccttcctggttttatgttatggtagttgtgactgtgctcctgctgacagaactcaaacatacttttacagagtttgctcaacggatgaagaatgatgaaatgattacgttagccaagttcttggctatcagcggtatcatattaccgatgcttccgcataagaatctgattccggatattaatcttactccttattctatctggttggcaacggtagtagtatccggcatttcctatctctcttatctattaaaaaggtatgtattccatgaatccggaacgttagtttccggtattattggtggattatacagcagtacggctacgatctcggtacttgcccgtaaaagccggaaagcctctgaacaggaagcgactgattatgttgctgccatgctgctggctgtcagcatgatgtttctgcgatttatgatactgatacttattttcagtagagaaatcttcctgtctatttatccatatctgttgactatggctgtagtcgcggctattgttgcctggtttatccattcccggcaaaaacgaccggaagaccagtctgctgaaacagaagaggatgatagtagcaacccgttggaatttaaagttgctttgatttttgccgtactctttgtgatattcactttcttaactcactatacgttagtgtatgcgggcacaggcggattaaatctcttgtcttttgtttccggttttagtgatataactcctttcatcttaaacttgttgcaaaatacaggtagtgtggctgcattgataattactgcttgtagtatgcaggctatcattagcaatataatggtgaatatgttctatgctctattctttgcagggaagggaagtaaacttcgtccttggattttgggaggattcggtgtggtaattgtttgtaatctcgttttgttactgttcttttatatttaaaaaatagagtaataggttctttttcataggctcaaattctagtaatttattgttttgtcgaatataatcgataaaatagaggtgattttatcgattatattcgataaaaatagcctatatttgtcgaatataatcgataatgtaaaatggataaggaactgataaaaggattgatagctgaatatcagcagtttgtaaagagcgtgtcattcgtgaaacgtgcggtgactctatctgataacttcaattatgtctttgtaggtttacgtcgggttgggaagtcttatttgatgtatcagcagatacatcatttaatagagacaggtatttcaccggaagagattcttttctttaattttgaggatgagcgaatagctggtatggatacagaacatcttgatatgataaagagatgttatgaagagatgtattctcatcgtcctatattttttttagatgaaatacagattgtaccgcattgggaacaatttgtccgacggcttgccgatcagaagtacagggtttatgtaacagggagcaatgctaagatgttgagtaaggatatagctactactctagggggacgttttatgattcaatacgtctatcctttctcgtttcgtgagtatttgtcatctaacggtgttcaattagataagctttggatttataagaaccgttcggaggtagtccgacatttcgatacttactttcgttttggtggtttacctgaactgttagtggccgagggacaagagaaacgacaatggctgagtagtctttttaataagatattcttcggtgatttagtggctcgttattctattcgaaatgatatggcgttaaaggtactcattcgaaaactggctgaaagcgtgaagcagccttcttctttcactcgtctggctaatttagtatcttccacaggcaagaagattaccactgatactattatagactatttgaattatctggaagatacctggatcatgttttctttagaaaactacgctagtaagttagccgataaagtgtccaataaaaaatattattttatggataatggaatacttagtctgtttttaatggatccggaaacttctttattggaaaatctcgtggcagttacattaaagaaacggtatggtgatgatttatatttctatcatcggaatatagaagtagacttttatctggatgaagggcataaggccatacaagtatcatatagtttaaaagatccggagactcgaaaacgagaagtgaatgccttactgaaacttgcagaaaatgtggcagtggatgatctgtgtattattaccagagacgaagagggaatgatcgtagaaggagagaagacgattcgggttgtgccggtgtggaggtggttgttggatgatgaagaatgaaagtttgtttttttatttgctaagttcctctgattataaaaagagaatactacgtggatatggaacaattgtatagctgtgtgcctcatgaatcagttacgatgtttttagtgactttgttttctttattaatgttacttgtcatattaaagtatgtttgatataaagttgaaaacgtgcaaaatatctgctatctgcaacactatgctacattggctattggtgcctttggcatttttttgttgcagatggcagataaggtgaaaagatttacagtgtatcctaagcttcttcccgatgattcatgaatattatactatagattgtaataacttgatatttcctattggaaccatgctttttcatcgtatttagcttccacttctgactcaatatcgggcggaagattatgaaagaaatcaatgtgggttttctcttccagcttatctatagacatagcataactcttgatagtggaacttgagtcataatcaaattgattcacgtaatacgccattccctgtgtgtattgcccattttggtataaaagaagagctataaaatagaaacgtggaacagcaacatgatttcccgtatattttatttcttcgtcatctatataccctcctttaacaacgtataacgtatcattatctcctaatttatgtacaaaatcattctttccatttggagcttttattgattgttcgaatttggtccagaatccagtattgaaagctgttgattgggggctcatatttgaataatagaaagtttgtttgtttgcttctagtgagtatgtacgatcgtatgatgcacataaatgtcctctactatattctttatagtctttttcataagtcctatattcttcgggtatttttttatcgtacatccaggcttcagtacgagatacattggatattttagttttactatcaaaagtaaatgcgacccagcgtgcatgcttttttgaataatcatattccatactatatgttataatttctttcccttctatgtttgtagtatgtgttatgaattgattcatgcttccacctttcaacttcggaatttcaatcctccctgcatatccagaaggcttttccggatccgggtctggatccggattcgaactatcgcctgctaattgtttgagtgtaaattgggcttcttcttttccggaagtgattgtaataatgacacttcgttcagctccggtatttgctttcatatatccactgatagagccatttccattgccggatgctctactcaatgtacaccaagtctcactgcttgaagcctgccatgtgccatcagcttttacacggatgataaatccgcctccatttgcattgatttgcgtttggtcaatagaggcaattccttgattggtattgcccggattgtccggaagttcaggagaatcctgttcactacatgagattgcagtgctacaggctatgaacaggatgaatagtctaaataatgcttttgtcatttcacttctttgattagataaataatagtaggcaagtgatcgctatatccgtttagccatacaccacctgcttgcgtccgtttaggataacctttgtatttcccctctttttggaacataaaatcacggcggaagatttcatgtttatagaatttcagtgtactgcggtcagtgcccaacaaattcccggtgaatacgatttgatcgaacaaattccatttgcctttgtacatcagagttccgtatccttttttcaaagtatcccaccaaggattgtacaagtctgtaggtcctacatcagcaggtttccgcttagctccaagtgctacagccatacttttatccatcgggtcatcgttcatatcccccatgataacaattttggctgcggagtcttcccttaacagtgagtctttgatcgctctaacctgctcccctgcgcgttcacgcgctggagaagcggcagctctcgaaggccagtgattgacgataaagtgcattttctcacctgcgatattaccgctggcaatcaagaaaccacgtgttttatgcaccgtatcattgatatatacataaggtacgagtttactatttgtcagttcaaacaatttgggattatagaaaaaagcacagtctacaccacgtctgtcttctccttcgtagtgaacatactggtaccctttgtccgctaaggcaggttgtttcagtatgtcttccaatactctgtaattttcgatttcagaaacgccgataatggcgggacccattggtaacttgtcggtacttaacatacttaatatttccgacatgtttttcagcttagccttatacttcatcgtattccactgattagtaccgttaggaagatactcatagtcattcttaccttcatcatgaatggtgtcaaacaaattctccatattgtagaacgctacactgtagagggcaaatttcttttcttgtccgtaggccatgaggacgaaaagagcgagtacacctaaagttattaagctttttttcatctttaaaattgattttaaaagtgggtaatttgtcatttgcatgacaaatatctaaaaagaaaacggaaaaaccacccttgctagttactttttttgcaaaaaacattgttatatataaaattctttgttattttgcgtaacaacatatttcttttatgttgcaaaatgaaagaccaattaacattaatataaattaaattatgaaacaacgactagggttagcgatcgtgctattttgcttaatgccagcactttttgcgcagcaaaaggcaaagcaaaacgcccgtgaggacaatgcttctttcatgtttacagaatcacaattgaatgaggatgatgatgcagcacagagcacatctgcattggtcacttctaacaatgatgtttatctgtcaaatgtaggttatctgtttagcccaatgagatttcgtgtaaggggatatgattcccagtacagtgacatgtatatcaatggggtacagtttaatgatgcagaaacaggacgtttcagctacggattaataggaggattgaacgatgctacccgtaataaggaagggatcggtccttttgaatttaacaactttacttttggcgcgataggaggtgccaccaatatcaatttacgtgccagccaatatgcggccggctcaaaactaacactgtcaggtagtaaccgcaactacattttgcgtggaatgtatacttattctacaggtctgatgaacaatggttgggcatttaccggatcattgggttatcgctggggtaatgagggaaatattgaaggaatcaaatataattctttttcttactttctcggtgcggagaaagtattcaacgaacgccatagtctctctttggcaacttggggaacaccgacagagagaggacagcaaatggcggcaaccgaagaagcttattatttagcgaacagtcattattataatccgaactggggatatcagaatggagaaaaacgaaatgcacgtattgtacgtcagttcgaaccatcggctattgcttcatggaatttcaccattgatgataataagaagttagtgacaagtgccggattcaaatattccaactatgggaaaagtgctctaggctggaatggtaatgcggccgatccacgcccggattattataaaaagttgcctagctcaatctttgatgtatgggaatctgttcctactgccgatgaattgcagcagtttaatgaagttacagataattggaaaaataataaagcttatcgtcagttagattgggatgctctttattttgccaataaacaggcgaatgcattaggtaaagagacactttattatgtagaagaacgtcatgatgatcagttggctttcaaccttagttcggtattcaatcatcaatggaatgaacacaacagctacattgcgggagttgccgtgaatacaaccaaaggtatgcattataaaaaaatgaaggatttgctgggcggacagctttatactgacgtcgacaaatttgcagtgcgcgatcatggagctagttccagtatggtgcaaaatgatcttgataatcctaaccgccgtattggtgaaggtgataaatttggttatgattataacatctatgtgaataagcagagtgcatgggtgcgttatcagggtaacaatggcgggtcattaaactattttgcttccggtaagataggatctacacagatgttccgcgatggattgatgagaaacggacgtgctccgttgaaatcacttggtagcagcggtacggctaaattccttgaaggaggtataaaagccggtttgaattgggctatcaatggtaaccattctttcacgttgaatgccggatatgaagaacgtgcaccgttggcctataactcttttattgctccacgtattaagaatgactttgtgagagacttgaaaacagagcgtatcattggtggtgatttgacttataacttcaacactccatgggtgatgggacgtttgactggttattacactcgcttccagaatcaggtagaaatggatgctttttataatgatagcgaagcacgtttcacttatctttctatgaatggcattgaaaaggaacattggggaatagaagcagcggctacctttaagttgacaagtgaactttcattgacggctatcggtacttggagtgaagctaaatacaccaataatccggatgctgtattgacatatgaaagtgagaatgagtcaaacctcgatcgtgtttatgctaaaggtatgcgtgctaatggtactccgctttctgcttatagccttgctttggattataacgtaaaaggttggttcttcaatttgaccggaaactattatgatcgtgtatatatcgatttctcaagctatcgtcgtcttggcagcgtattggataaaaatggtgccggcgtagatgctaatggaaatccggttctccatgtaccaggtcaggagaaactggatggtggatttatgttggatgcttccatcggaaaatacattcgtttacgcaacggaaagagcattagccttaatttgagtttgactaatatcttgaacaatacagatttgcgtacaggtggtttcgaacaaaaccgtgatgataattacaaagacggtgacgcacgtgtttacaagttttctaagaactctaagtatttctacgcattcccgttcaacgctttcttgaacattggttatagattttaagaatgtgtagttatcaatccaaaacaataagaaaggaagaaacaattatgaagaaattactatctatattatgtaccggattgctgctatgtggcgcaggtctcacttcctgtgagaactatgatgatccggtgacgggaaatgcttatggcaataattcaatcccggaaggacgcaccatttcaatagctgcgctgaaagagaaatacaatgatttcattgatacgagtactgatacgtatactactattgaggatgagacacgtattgaaggtgtaataattggagatgatgaaagtggaaacatctacaaacagcttgtcgttggtgatgaaacaggtgctattattgtaggagttaataattccggattatatgccttctgtccggtaggtcaaaaagtcgtaattgactgtaagggattgcaaatcggtagttaccgtaagcttgcacaaatcggttcaatttatgaaggcaaagtgggacgtatgcccgaatatgtatggaaacagcatgtacgtttgattaatgaaccgaagttgttttatgatgaattaagacctttagaaatctctacggctgcagaattgaccgctgtggatatgaagcaggcgccattgcttgttacattaaaaaatgtaagttttccggatgcaaatggtactacaacttatgcagcagaggaagatgtagctaatccaaatctttcttttgtagaacgcaatatcaactatgctgatggtactaagtctgcggctgtggcacataccagtatctatgctaacttctcaaaagatattcttccgcaaggtactttaaatgtgacaggtatactgacccgatataacacttggcaattgattattcgtactggcagtgatgtaaaacgcaataaataattcaaataacaatatacaattatgaaaaagattctaaatgctttattcttgacactgcttgcagtgttcacatttagttcatgtagtgatgtaccggctccttatgatatattgggagagggtgatgttccggggctgacgggtgatggttctaaagataatccatatactgtatcagatttaaaggctaaggccgatggtactactgtagcttgggtacaagcatatattgtagcaggtattaagtcttctaccgatatgtccataagttctgaaaatgatgttgtttttggaacacaacccacaggtgtgaaagctactgcatttctgattgcagatgaccgtggagaaagcgattataagaattgttcagcggttaatttaagtggtaaaactgctggctgctctgaagttaaggcagctttaaatttggttgataatgcaacaactcctcttcctcgtttagtgactttgaaaggaaccttagtgaaaaatacatggggattaccgggattgaaagaagttacaactgcgatattggaagatggcactattattggtgaagggggagatgagcctacgcctccggttggcggagttacattctttgaagaatcatttgcttcagataaaggtacatttactattgaagataagacacgtcctactaaagtaagcgaaatctggaaatgggagtcttatacaccggagactggcggaactgccagcaaatatatgaaagctagtgcttatatctctgcaacagaaaaagaagcatcagaaagctggttgatatctcctgttgtaaatctgacaaaagcgaccaaagcttcattgacatttgaacatgctcataaattctgtggtgatcctgcaaaagagttgactatatgggtgaaggaaagtactgcttctgattggactcaagctactataccaacttatggaactaatcaggattggaaatttgtttcttctggtaatattgatcttgctagctatattggtaaaaatattcaatttgctttcaaatatataagtactacttctaatgtaggtacatgggaagtgaagaatgtgaagattgttggagaaggtgaaggtggtggacctgttgatccggacccaaccgaagggaagttgatctttactgaaaaatatggttctgatgtagatgccaatatattgacagctacgacggctatctctagttttactcattgggataatagctattcatactcggctactacagctgatattcgcgccattgctcatagaactcctgataatacgacagagacgaaaaaggtgaataatatttggttcccagctagtaaatctgcagaatttgtaattagtggcattaatattgctggacataccaagtttattgttgcttatgaagttgcttctaatgtttatgcgacaactgaaacagataatcttaataatttaaaacttacattgaatgaaaaagaagttactcctaccagtaaggaagtcgtaggaaatggtaaggctagcggaatattccatgaaatgcaagttgaaatatcagtagcaggtacagataattctacgttgaagttttctactaatggaacagataataagtttgggctccgtctttataatataaggttatatgcagctgaaagtggagaaactgatccagaaccgggagaagggacagaagttctttttgctgaaggatttggggtaatggctgattatgctaaagagaataaaacggctatagcaaattggacacattttgatacccaattaactattgtggatacaaaagcgacagcggatatccgtgttcctgccaaaacttcaaccgatgcatgtttatggttgccttcaagtttttcgggtacggacaaatctacagaaatagagatttccggctttaattctactggatatacaagtcttactttaagttacgatttggcatgtggaaaaggaaatacatcgcaaactgttattaaggtgaaatgcgatggaacagaagttgcagtgcctgctgtaactcttgagaaagcaaatgttttctatcctgtatcaattacaaatattccaaccggaactaaaaaaataacatttgtttctgacagtgaaaatacaatgggattccgtttggataatataaaattggaaggtataaagtaaagacgaaattctttatatacataatgaaaggggtgtcttgtaaggcacccttttctttcataaagtttttgaattataaggaatttaatatatagttttacgataatgaaaaggaagaacgaactcttattgaacattatgaatagttctatacttgtttctctgaaattataatttataaaaaaagatttggaaatgaaatatattttgagatatttttggttaggggtattttgggtgtgcttttattcttgcagtaaagacgagaataacaactccaataattttgccaccggcatcgtagaacttcctgctctccgcaatggagcaaacgatgtattcataacccactctactactttcaaagggcagaaagtaacctctttcagtatggaatacgataagagtaagaaacattcccgttggattgcttttcgatttgacaatcaaactagattgcaagaggcaactcgtagtgatgaatttattccggacccttctcttgatatggaatatcaacgtactcaagtagattttgggaaaaaaggttatgatagagggcacctctgtgcttctgccgacagactttatcaacaagaagctaatgaccaaaccttttattatacgaatatgagtccgcaacggaacaattttaatacaggtgtttggttggcattggaaggacaagtacagtcatgggggcgtagctgtacagcttcagataccttgtatgtagtaaaaggcggaacgattgataaggaagaacaagtcaaagaatatataggtggcgaccgtagcaagcctgttcctaaatattattatatggctttgttgtttaaaaagggagattctttcaaagcaattgccttttggatggaacatacagacagcaaaccgtcaaaaacaataaaacttgttgactatgcattatcaatagacgaactggaagaaaagacaggaatcgatttcttcccgagtctgaatgataatttagaaaatgcgcttgaggctacgtattcaacaaaagcgtggccgggattggaataagatcaccacgttaataataacagtctctttgtcaaggcagggtatacttcaggatgctaccacccatttctcgatattacgggttttctcactgaagttaattcctatcttgaatagtttgcgtccatccgcttcgaaaggcagcgcatagcgtttgttgttaatctgctgcaaagcctcttctgctgttccgtttagcttgaattccataatataaatgaatttgtctgtttgcagaatgagatctacacgtccgttattggtgtggtattccactttggtatagaaaccaaccaatttgaaaacaatgaaaagtacgttctcataatgtagttcctgctcccggattacttcgtaagtcgtatcggcaaagaaactctgcaggcggtggaagaaagaatcataatctcccgtttctacttcacggacgaatttttgaacttcaaatggggattccaccttattcacattcgcgtaaaaaggaagcagaaagcgaatgaatccttcttctacttcacggttggggaaacctaaacggtatatgccaaaacgttcgtcatatcctttaatggtgaggtatccgctttggtaaatcactggaatcgggttggttgattcggagtcgatgctattcagtacttgtgcatcagtttcttcgtgtgccatccgttccagatcataatgatgcttttttagtaacttaaccagataggtaggtgtccccgtctcaaaccaataactgccgaattctttatatttgaaagcgttgagcagactaaacggattatatataccgatagaattatgtgtaaaatgatagccatcataatattcttttagttttgtacagagcttgtcatacgacaaaccttgcgtctctgcaaactcatgaagttcgatatctaagttttcatgaagctcctgatcgctgacaccgcagatttcaacataatcttttcgcattgagatgtcatccaaattattcaagtcgctaaacacactgactttgccaaactttgtaacgccggtcaagaacgcaaactttatatagccatccattgttttgagtgccccatagaaaggttttaaagtgtcccggaattgtttttgcaatttttcgttgccgatggcttgcaacatgggcttatcatattcatctaccaaaataactacacgctgtcctgcctgcttgcaggcgcgttctatgataccggcaaaacgcagggaaaatgagcgttcggatggctcggcaccatagagcttttcccatgcagtcaacgatttttcgagtatattatccagactttccggcgtatcatatttttcgatattaaggtccagatgtagtatcggatatttaatccaatccttttccaacctttctacagccagtcctgcaaacagttccttttttccttgaaaataggcttccatcgtagagatgagcaggctcttcccgaagcggcgtggacggcttaagaaatagtaactaccggtttttaccatttgatacatcaatgccgttttatcaatatataaatagccgtcattacgaatcttttcgaaattctgtatgccaatgggataaattttagtgctcatatactccggttttataaatcaattacacaaaggtaataaatttccgggtacttcattgcttttaaaaagaggaaagtataagtatagttgcttttaactgaatgaagtgtagaaaacagtacatactgtatacattaacttcccgtttccaggcggggaactgtcgtttctggcattagaaattacagtttccacggtaggaaacgagagtttctaaggcgggacactacagtttctacgtaaggatactgtcgtttccccgtagagataccacaaattctccatagagtaaccccaattatcccatagctttgcgtcaaggaatcaaggctttttctttgattatataacgtgttgcagatactttatctgcaacctatctgccgcaggtatctgccacgttccaactatttatcaattagcacattacacgcgtttggttgcaggtggcagatgtttttatgttttttcaactttatagaggaaggattacgcatcaaaattagggtcaccaccgtaagtcataaacccaattcacctctgtgtcctccgtgtcctctgtggtgaaaagaatcaaaactgcatagaaacgagttaaacgttgcgctaatgaatgggtcaagggtgagggatggtgagggtagatttataactttcgtatttttttttatagataaaaaaggagatagtatagaaaataataaaataaaaggttataaatctaccctcaccacccctcacccttgacccatatcttataataaaaagataacggggaatcttaaaaactcaatcgtctttttcagatttaccacaacgtttttagaatactccattattttattcaaaacagtgcaggaatgaatcaaattttagggatatggctgtcctaaaccaaatcctccaagaattacaattgagtcggcttgttgaatatacataacttccagcatttatttccatatttccaccacatttcaaaaaatatgtatatctttgtcatacgctttctgctcatcagcgtgatgaaactagtagaaggcgatatatattactaaatggaatatgtaatgtattgtctctcccactcgaaacttagcaatttcatatagaggagagatgattcaacagatattccacgcgaacggctttatatcaacatatccgttggagatgtgttatatataaacgattggcgtggatgtctgttgttatcattgtctttctatagggtatgctaagacctcgagtggagataatggtgcaacagcattcacgtcttttttgtgtccggtcggttatgattacccctaaaagtctaacctaaacaattccccgtccgcccgaaatacagaaaacgtggatgcacgttgtgccacataaacaaaataatactccatttttattgtggaacacattaaaacaaaagcattatgccaaaatggattagcgtagaagaagcggcggccaagtatggaatcaacaaagaagtaatctggctttgggcggatatgaaaagattcccgatgtcgtatgagaaaggcatcaccactgttgatgaagaaagccttatcggattcctgcatcagaataaggatcgagttacagccgagtatatcgacacattggaagacctatgtattgaaaaagcaaatatctgtaacttatatgctgaaattattggctgtcaagacaaagaactcttgtatcaaagggagcaaatagctcgaatgaaagagatacaaacagctatgaaaaggcaaaacagccggcttcgggattgtgagaaagtgttcacgaaatatgaagagaactttagtacttgctggattggaagaatctgcgctcacttaaggcgactgatacggttgatacgatggtaaataccattctatctccttttaaaccctgaatagatatatttaaagatatccctaaacagaaatgtttaaaaatactagaaatatactgtagtaagattttttatccattcgttttatattcttaactccgaaaaattcgtaagtgtagataaaccaactacttttggttctcgaatttgcagcatttttgaatgtcttgcgtctaataaatataaactaatatatttctagtcatgaaacacagactgttactactaattctattcgtattcactacctccgtggcggggtgggcacaaaaatccacagctccttcttatacagtcaaaggagtacttattgattctttaacacaagagggagaaccgtatgctaccatcaaaatagcaaagaaaaatgctccggataaagcagtcaagatggcggtgactggggcgaatggtaaatttcaggagaaactgaatgtcgctgcgggtaattacatcatcactatttcttcgattggtaaagcgccgatagtaaaggaatttactctaaaaccgtccgtgaaggaggttgacttgggcacaatgatttcttcagaggccaataacgtattgaaaggagtggaggtagttgcacaaaaacctttggtaaaggtagatgtggataagattgaatataatattgaagatgacccggactcaaaatcgaacagtatattggagatgcttcggaaagtgcctttggtaacggtggatggagaagacaatgtacaagtaaacggcagtagcagtttcaagatacatgtaaatggaaagcccaataatatgatgagtaataatccgaaggaagtactgaaaagtatgccggcaaacacgatcaaatatattgaggtgataacttcaccgggagctaaatatgatgcggaaggtatcggaggtattctgaatatcgtcacagtaggttccggatttgaaggatacacggctactttcagaggaaatgctaataataacggagtaggtgccggcacttacgcaatggtgaaacaaggtaaactgactgtttctgccaactataactacaattataataatagcccgcgcagctattccgacagttatcgcgaaaactacgaaccggataaagagaatgaaaaatatctggaatcggaaagtagctccaagtcgaaagggaatttccagtatggcaatttggaagccagttacgagattgatacgttgaggttgctgaccgtggctttcggaatgtacggtagcagtgacaaaagtaacagtggcggaaatacgattatgcacggagctgatcgacaggattttgcgtaccgttatagaaccgacaatcatggaaaagggtcatggtattctatcaacggaaatatagactatcaacgtacttcccgaaaaaataaagaacggatgattacgttttcttataaaatcaattcccaaccccaaacgaatgattcatataatacttatctggacatcgagcctgatgagaataaactggatatcattaaagaattgtcattaaagaatttccattcggacggaaagacaaatacgatggagcagactttccaggtggactatactactccgattggaaagctgcatacaattgaaaccggtgccaaatatattttccgacgtaactccagtgataatcggttttatgaagccgagggagcaagtgaaaactatgcatataatgagaatcgtagtagcgagtaccgtcatttgaatcatattctctctgcttatgccggatatacgctgaaatacaagggatttactttcaaaccgggattacgttatgagcaaaccatacaagaggtgaagtatctggtgggtccgggcgagaactttgattcgaattttagtgatctggttccttccgtttccttgggaataaaactaggaaagacgcagaatttgcgtggtggatataatatgcgtatctggcgtccgggtatctggaatttgaatccttatttcgataatcagaatccgatgtttatcaatcagggaaatccgaacctgaagagtgagaagagtcattcgttcgacttgtcttacagcagttttacgtccaagttcaacatcaatctttctttgcgtcattctttcaataacaatggaattgaaagaatcagccgtttgattactgataaagacggagaaatctttgaagatgggcataaagctccctacggtgcactgtatagcacatacggtaatatcggaaagagccgggaaacaggattgaacttttatttgaactggaacgcttctcctaaaacgagaatttacgtcaatggacgtggcaattatagcgatttgcggagtcctgcccaagagttgcacaattatggatggaatgcttctgcttatggaggaattcagcagaccttaccgggaaaagtacgtttgagcctgaacggcggaggtagcacaccccgaatcagtttgcagggaaaaggttcaggatatagttattatagtttgggattgagccgttctttcctgaaagaagaacgtctttctttgaatatttattgcagcaatgttctggagaaatacagaacttacaataaccacacagaaggagctaactttatttcgaagagttcgagcaaatatccgagccggtattacggtttcagtattagctatcggcttggtgagttgaaagccagtgtgaagaaagccgcacgaagcatcgacaatgacgatgtgaaaggtggcggcggaggaggtggaaacaccggtggtggaggtggtcagtagaccacttccgcacaccgagattccctcttatttctgtctcacgtcttgcttgttggtgttaaaaccaagtttggttaatccggcctgtacgtcgggatggctcatgaagagtttccataataatccggtccggtagttttcgatcatgacagcaataggaccctggtcgatagccagataacgttgcggataccaattgtccgtttcgctgaaagcatcgtagaatccgaaaggaccgaacactttatctcccataccatatagatggcgcatcacttgcatggaatattccggtgtatagacaatggatgaaagtgcggcggtaggggagattactcctttgtcctcctgctcattgggcgaatgagctgcatatccatcgacggaatagctggcggtcagtccccaacaatccggtccgaaacctttgtaatgtttagggttgcggatgcagtaagcacggttcaccagtgtcaggttgcgcatttcgtggaagtagctggggcagtattcatctttcagtcccaccgggtcaagtccgaggaaagagtattgagcccagaaaagcggtccggcttcggtgccctgatagcggaggtgcaactcgattccttccactttatgcggagaaacgatggctccgttctgtgcccaaccgtcatgatagacagccgcaggtactccgtgtgtaggagaagcggcggcaagaatatacataatcatacattcgttgtaaccgtgtacagggaaattcatttcccagccatacgtcggactccaatgccagtaaagaacgttttgcccgccttgccgataccagttccagtcgacatcccgccaaatctggtcgatccgttgggcgagggctttctctttctcgtttccgttgacgtaatattggtgtacggccagcagcccttggatgaggaaagcggtctctaccagatcgcccccattatctttttgcccgaatggtttcaccttgcccgtatcaccataccaccaatgagggtaggctccatggaaacggtctgccttttcgaggaaagaaacgatgcgttccattcgtgccagtccctcttcgcgggtgacgtaaccgcggtcgattcccgcaaggatagccatgatgccgaagccgctgccgccggaagtgactacgttggcatcgttttctggataaacgccgtccacatgataacgttcgggagccaagccgctattcggctcggcaccttcccagaaatagaggaaagtccgtcgctggacggtatccatcagggcgtcgtccgataacgagtcggtggctgcggaaaggttgttgcttttgcttttccctttacagctctggaaagtcagggcaacggcggatagaaatagtaacatgagcggaagtgcactcatttctattattcttttatatttatcgttcataatcaaggtgataaaagtttagtttaacgtgaacttcgcggttttcacatcacggctgttcgtaccgatcatcacttcaaagtcgcccggttcggcaaccagttgcaagtcataattatagtatcgaagcatttccggagcaatcttgaaacggacaatcttcatttcacccggttccaggaatatcttttggaaacctttcaactctttgacgggacgggtactgctacccacaacgtcgcggatataaagctgtaccacttccgagccgggccatgttccggtattggtaacctccactgccgcggtcaacgaaccgttcatgtccatggaagaatgactcaagtcgatgtcactgtaagagaacgtcgtataagaaaggccgtaaccgaacggataaagcggatcattatccacatcgagatagttgctgcggaatttctcgaaccatttgccatctttcaatgggcgtccggtatttttatgcgcataataaagaggtatctggccgacattcttcgggaaagtcatagtcagtttaccacccggattgacgtaaccgaagagggcgtcaccaatggcgtaagcggcttcactacctccgaaccatacatttagaatggcaggcacatgctcctgttcccagttcagcgtaagcggacgtccggtgaataacaccagtaccaccggtttgcctgtctttaaaagttctttcaacagattctgttgtacgtcgggaatattcaagtctgtacgactgctgctttcaccgctcatttcagaagattcgcctagcgctgcgatgatgatatccgaccgacgggctacgttcaatgcttcgtccaacaactgctggtcggtgcggttgtcacggttcagggaacggccgaacatcgttgcccgttcttcgtaacttgcatcactaatcaggttgcttcctttagcgtacatgatattcgcttttccggctgtcatctctttcaatccttctaccaaagaagggcaacggtcgagcacagctgctacgctccatgtacccggcatattgctacggctgtttgccaacggaccgattactgcaatatttcctttagggttgaaaggcaacaacggatttccgttcggattaccgtcgggactgtcattcttcagaagaacgaaactttctgctgcaattctgcgggctgcatcacgatgggctttggtaaagatgtcgcgtgccggacgtttcggatcgcaatatttataaggattatcaaacaatcccagtttatatttggcttccagaatacgacggcaagccgtattcaatgtttccatagagacttttccttcctgaacggatttcttcagtgtccctacaaaaccctcgcttaccatatccatatccactccggcgttgatggcacgggcggatactgtctgaagatcaccgataccgtggtcgatcatttctgaaatgccggtataatcagttaccacaaaaccgttgaatccccactgtccgcggagaatatccgtcatcagccatttattggcagtggccggaatgccgtctacttcattaaaagaagccatcacgctacctacacccgcttcaacggctgcttcatacggcagcatataatcattgaacattcgttggcggctcatatctacggtgttatagtcgcggccggcttcgcctgccccatataacgcaaagtgttttacgcaggccatgatttcgtcattccgttccatgtttttcccctgatagccgcgtaccatcgcttcggcaatcatggcaccgagaaacgggtcttcgccactaccttcggatacgcgtccccaacgagggtcgcgtgaaatatccaccatcgggctgaaagtccatgagattccatcggcacttgcctctacggctgcaatgcgggcagactcttcaatggctgtcatgtcccaggtgcaagacaaaccgagcgggatagggaacatcgtttcgtatccgtgaataacgtccatcccgaacaataacggaatacccagccgggaatcttccacagcctgtttctgtacttcacgtattttctctactcctttcaaattgaacaatcctcccacttcgcctttcttgatttttgcggcgatgtcgctgcttttagcttgtcccgtagtgatctctccggtgacaggaaggtttaactgtccgattttttcttccagcgtcattttattcatcaatacgtcgatgaaacgatccatatcctgtggcgacttttgtgccgacgcggttagaaaacctgcggcaaacaacagaatggatagacttaactttttgtatatcatattattatagttacttttatctctattcatataaagtcctcctgatgcgttgaatgttcggcaccgaggaggacattgttcgacaccgaggaacagtagtttcggcaccgaggaaacaaccgtttggcaccgaggaactttcttattggtagtcggggttctgtactaacactcccttagacttgtcgatctctgtctgcggcagtggaagcagtgcgtttttgtcctgataattggttttaccggctgcgtgcaacacttcttttgcaatgccccaacgaacgaggtcatagaaacggtcgaattccaaccctaattccacacggcgttcgtggcggatggcctcacgcaattctccctgatcggtagtcgtcactttaggtaatatattggtattggtgcctctggcgcgtgcgcgtacttgttccaaatagtcgattgcttcacccggaatacctttttcattagctgattcggctcccatcagcagtacatctgcgtagcggatcagacgaatgtttacccaataacctttattggtatattctttacgcaaagctgggtcggtataggctttcttattgaagtaagcacctattgccggagaaaccggagattcaccgtatggctcgttggtattttccggagtgataggatcgctgtccgagtggcggaagtagagtagggtggagtttttgcgtggatcaccctgttcgtaggcttgcgctatgtattctgttgccatgtgccatccccagcccaagtcccattgacctgctccgcgtacaccttgtacttcacagaactggctaccgataacggtactttgaggaagagcggcagtagctgtacattgcaactcgaatatggaacctccgttattttcaccatcatccgtgaaaatctcattatacggagtctttaggttgtagagcccctttttgatgacgtcggtggaggctgtgtacatattgttccagtcgttgcgcatcatataagtacgcgcgtgtaaggaacgggcagctccccaagtcagtcgtccggtgtattcgctgctccatgtttccggcaatgactcttctgctgttttcaggtccttgtcgatttgctcatagattttatcagcacttgtcttcgggatattggcttccgaagcatcgttgattttataagtcaccaaaggaacttcgccgaaagctcttaccagattgaagtagcaataagcacggaagaaagaggcctctcccttattgatgatgtcttcagtttctgtttgtccggctgtttctttttctgcaatggcatcaagaatctcattacattggtagatgatggcataattctgtccccaataagcacccagtaggccgttggtcggtgtatacacaaaatcatcatacatttcggctacatcagagccatcgctggcaatacttcctttttccgaatcttccgaacgaaaacagtggatggcaaaagcaggagggccggctgtcacattatagttacgcatcatcgtatagacattataaatcttaccgttgaccagagcgttcggattgtcatcttccgtgaactgtccttgcggactacgatccagaaagtcactacagctacctagaaataatgtagttgaagtaataagggttgcaaatatatatttattcagtttcatataatgatagttttaaagattaaagttgtgttccgcatggaaaactggcagtggcaccttgtcactagaatgttaggttaatgccgaaggtgtagactgcaggtacaggataactaccgttatctactccgaatgcggtggcagttcctccaagttcgggagtatatccggtgttatgtttccatgtcttcaggttctgtatgttgacatagactttcagagcttgcagacgtattttggcaattaagctcttgtcgaacgtatacgctaactgtacattacggatacggaagaaactaccgttctcaatgtaatagtcggaattcaagttattgatagaatgtttggtgttcagcaacggttgggtgttggacgtaccttctccgtgccagcggtccaaacgttgttccaggtagttgaactgggcaaaattgtagttatcccatgtacggaaaatcttgtttccgccttgtcccatcatgtcgatgcctaacgaccaattcttgtagtctactccgagagaaaaaacgtaagtgacctttggagtcgggttgcctatcatggtacggtcttccagggtgatttctccgtcaccgttcacatcggcgaatttcaggtcaccgggggtaacggtagccagtgtatttttgggtgatgcgtcaatatccgcttgtgactgataaacgcctgccactttgtaaccgtagaaatatccgataggataacctgccattgtgtaactttgctgcttatctccggcaatgatggaatatccttcctgaacaagactttttacctcattcttgatagtagtcaggttggcactgacggaatatccccaatcaccaatctgatcgcgccaggttacagccatttccactcctttattctgaatctctcccaagtttccgataccggggatagttccggaaattccgggaacttcggctaacaaatctttggtattcttcttgtagtaaacaccctcaaaatgcaagcggttgcgaagcaggttcgtttcaaatccggcttcccaggcttctactttttcccaacgcaggttaggattaggaagataggcaagctggtatccgggataaatgatggacggtttaccgaatacggccgaataagcattggtcaataagggttcggcaggataggctttatccaggttctggtttcctaacgtaccgtaagatgctttgattttcaacatatccagccatttgatgtctttcataaattcttcttcggacatcaaccaacctccacccagcgagaagaagttctgccattcatttcctgtataggagaaagcggaagaaccatcccggcggaaagaaccgttgaacaagtatttgcctttatagttgtagatcacgcgtgcaagtacggataatgtactgcgttcccattgagtacttccattggtagcggtagctgcatcgccgatgctgacaaaccatttgtccggattatccggaataaccagtccgaccccctgcttgcgtgctccgtccaatcggctcaacgaattataataggtagtaaaaccggcggtagctgtcaggttatgatttccattatcaaagctgttggtgtatgtcaacaggtagtcgctctgaactttggtttcattctctttaaactggctgacctcggtcttgcctgttcccaaagtagagatccctccgttgacagtggcatcgtatacttttacgatcggtgtatacgtccgtccgttgttcgacgcataatccatggagaacatcgctttgaacgtgaaatgtttcaggaagtctacctcaccataaatattaccggatgcccggtagttctccgctttggtagtattcgctttcaattcgacgtctaccatcgggttgttgatctgcgctttctggaattcgggcagagccgtatataatccgtattcgttgttatacaccggagcgataggagttgcacgcagggcattcaatacctgtttggaatcagcaggaagcatacgtgcaccgttgaattggaaaccgactttcaaaaagtccgtaatcttataatcattacttgcgttgatggttaccttactgaatttctcatgctcgatgttgccttgttcgtaagagtagcccactcccaggtagaaactatgtttgggcgaagcccctgtaatactgatgttattgtttgtaatgaaagcagtctggaaaatttcgtcttgccagtcggtattggcatcccagccggtataatcgaaagggtcatctttctgattggcgagctgttcgttatatagttccttgaattgtgaaccattcaccaatttcactttatctaccactttcttgaaaccgaaagaagtattgatattgaccagtgtctgtccctctttggctttttttgtggtaatgatgataacaccattcgcaccgcgaacaccgaagatagccagagatgacgggtctttcaggatttccatggattcgatgtcctccggattcaggaaattgatgttgtcattgaataatccgtcgacaatgtacagcggtttatatccgttgatggagtttgttccgcgaatacggatttccgggtccgatccggctcgtccggagtttacaatctgcacacctgccactttcccctgaagggaagatagcggattcattgccggtttgttggctaactcttctcctttgatattggtgatagaacctgtcaagtctcttttctttgcactaccgtatccgataacgactgtttcggctagtacttgtgaatcttcttttaaagtgacattgatgacgttctgtgtccccactttaatggtttgcgaagtcatccccacgtatgaaaatgccagtacgtcctccggagtgacagagattgaatatttaccgtccatgtccgtgatggttccggtggaagttccttgtacgagtaccgatgcgccgatcaatggttcattggcagcgtccgtcactgttcctgtcaccgtctttgtctgtgcaaaggctgatgcagaggccagtagcaggcaaacaagcg
